United States Patent Application Publication US 2026/0242757 A1 - sequence listing, part 3

SEQ ID NO: 6000 - protein, 394 aa, synthetic construct
  REGION 1..394: note = Variant of terminal deoxynucleotidyl transferase
MHHHHHHGGSGHPEGNTPEKEVPSVIARHVSPYACQRKTTLNNYNKKITDALEIMAENYKFKENLQARLEARRAASVLKSLPFEVTSMKDIQGLPCITDDVRPVIEEIIEVGESSRVKEILNDERYKAFKQFTSVFGVGVKTAEKWYRMGLRTLEEAKASKSLKLNKMQKAGFLYYEDLASGVSKEEADAVLDIVKETVRTVSPDALVTIAGGFRRGKPQGHDVDLLITIPGRPTDPELLHKVVDLLKKQGLLLYGDIRERTFVEGQLPNPKPDQLDNHQKCFAILKLYRPKVDNSAVGTSKKVDMAEVKDWKAVRVDLVVAPDEQFAYALLGWTGSGMFRRDTRRYAEEERDMLLDNHGLYDLKKGIFLSADSEEEIFGHLDLDYLEPWVRNA

SEQ ID NO: 6001 - DNA, 1182 bp, synthetic construct
  misc_feature 1..1182: note = Variant of terminal deoxynucleotidyl transferase
  source 1..1182: mol_type = other DNA
atgcaccatcatcaccatcacgggggctccggccatccggaaggtaataccccggagaaggaggtgccgagcgttatcgcccgtcatgttagtccgtacgcgtgccagcgcaagaccacgctgaataactacaacaaaaagatcaccgacgcgctggaaatcatggccgagaactacaagtttaaagagaacctgcaggcgcgcctggaggcccgtcgcgccgcgagtgtcctgaaaagcctgccgttcgaggttaccagcatgaaagacatccaaggtctgccgtgcattaccgacgacgtacgtcctgtgatcgaagagatcatcgaagtaggcgagagcagccgtgttaaagaaatcctcaatgacgagcgctacaaggcctttaagcagttcaccagcgtgttcggtgtgggcgtcaagaccgcggaaaagtggtaccgtatgggcctccgtacgctggaagaagcaaaggccagtaagagtctgaagctgaacaagatgcagaaggcgggcttcctgtactacgaggatctggcgagcggtgttagtaaagaagaagccgatgccgttctggatatcgtgaaggaaacggtgcgcactgttagtccggatgcgctggtgaccatcgccggcggtttccgccgtggcaaacctcagggccacgacgttgacctgctgatcacgattccgggccgtcctacggatccggagctgctccacaaagtggttgatctgctcaagaagcaaggtctgctgctgtacggggacatccgtgagcgtacgttcgtggaggggcaactgccaaatcctaaacctgaccagctggacaaccatcagaagtgcttcgccattctcaagctgtaccgtccgaaggtggataacagtgcggttgggacgtcgaagaaagtcgacatggctgaggttaaggattggaaagcggttcgtgtggatctggtggtcgctccagatgagcagttcgcctatgcgctgctcggttggacgggcagcggcatgtttcgtcgcgatactcgtcgctacagtgaggaagagcgcgacatgctgctcgacaaccatggtctctacgacctgaaaaagggcatctttctgagtgcggacagcgaagaagagattttcggtcatctggacctggattatctggagccgtgggaacgcaacgcg

SEQ ID NO: 6002 - protein, 394 aa, synthetic construct
  REGION 1..394: note = Variant of terminal deoxynucleotidyl transferase
MHHHHHHGGSGHPEGNTPEKEVPSVIARHVSPYACQRKTTLNNYNKKITDALEIMAENYKFKENLQARLEARRAASVLKSLPFEVTSMKDIQGLPCITDDVRPVIEEIIEVGESSRVKEILNDERYKAFKQFTSVFGVGVKTAEKWYRMGLRTLEEAKASKSLKLNKMQKAGFLYYEDLASGVSKEEADAVLDIVKETVRTVSPDALVTIAGGFRRGKPQGHDVDLLITIPGRPTDPELLHKVVDLLKKQGLLLYGDIRERTFVEGQLPNPKPDQLDNHQKCFAILKLYRPKVDNSAVGTSKKVDMAEVKDWKAVRVDLVVAPDEQFAYALLGWTGSGMFRRDTRRYSEEERDMLLDNHGLYDLKKGIFLSADSEEEIFGHLDLDYLEPWERNA

SEQ ID NO: 6003 - DNA, 1182 bp, synthetic construct
  misc_feature 1..1182: note = Variant of terminal deoxynucleotidyl transferase
  source 1..1182: mol_type = other DNA
atgcaccatcatcaccatcacgggggctccggccatccggaaggtaataccccggagaaggaggtgccgagcgttatcgcccgtcatgttagtccgtacgcgtgccagcgcaagaccacgctgaataactacaacaaaaagatcaccgacgcgctggaaatcatggccgagaactacaagtttaaagagaacctgcaggcgcgcctggaggcccgtcgcgccgcgagtgtcctgaaaagcctgccgttcgaggttaccagcatgaaagacatccaaggtctgccgtgcattaccgacgacgtacgtcctgtgatcgaagagatcatcgaagtaggcgagagcagccgtgttaaagaaatcctcaatgacgagcgctacaaggcctttaagcagttcaccagcgtgttcggtgtgggcgtcaagaccgcggaaaagtggtaccgtatgggcctccgtacgctggaagaagcaaaggccagtaagagtctgaagctgaacaagatgcagaaggcgggcttcctgtactacgaggatctggcgagcggtgttagtaaagaagaagccgatgccgttctggatatcgtgaaggaaacggtgcgcactgttagtccggatgcgctggtgaccatcgccggcggtttccgccgtggcaaacctcagggccacgacgttgacctgctgatcacgattccgggccgtcctacggatccggagctgctccacaaagtggttgatctgctcaagaagcaaggtctgctgctgtacggggacatccgtgagcgtacgttcgtggaggggcaactgccaaatcctaaacctgaccagctggacaaccatcagaagtgcttcgccattctcaagctgtaccgtccgaaggtggataacagtgcggttgggacgtcgaagaaagtcgacatggctgaggttaaggattggaaagcggttcgtgtggatctggtggtcgctccagatgagcagttcgcctatgcgctgctcggttggacgggcagcggcatgtttcgtcgcgatactcgtcgctacgcggaggaagagcgcgacatgctgctcgacaaccatggtctctacgacctgaaaaagggcatctttctgagtgcggacagcgaagaagagattttcggtcatctggacctggattatctggagccgtggtggcgcaacgcg

SEQ ID NO: 6004 - protein, 394 aa, synthetic construct
  REGION 1..394: note = Variant of terminal deoxynucleotidyl transferase
MHHHHHHGGSGHPEGNTPEKEVPSVIARHVSPYACQRKTTLNNYNKKITDALEIMAENYKFKENLQARLEARRAASVLKSLPFEVTSMKDIQGLPCITDDVRPVIEEIIEVGESSRVKEILNDERYKAFKQFTSVFGVGVKTAEKWYRMGLRTLEEAKASKSLKLNKMQKAGFLYYEDLASGVSKEEADAVLDIVKETVRTVSPDALVTIAGGFRRGKPQGHDVDLLITIPGRPTDPELLHKVVDLLKKQGLLLYGDIRERTFVEGQLPNPKPDQLDNHQKCFAILKLYRPKVDNSAVGTSKKVDMAEVKDWKAVRVDLVVAPDEQFAYALLGWTGSGMFRRDTRRYAEEERDMLLDNHGLYDLKKGIFLSADSEEEIFGHLDLDYLEPWWRNA

SEQ ID NO: 6005 - DNA, 1182 bp, synthetic construct
  misc_feature 1..1182: note = Variant of terminal deoxynucleotidyl transferase
  source 1..1182: mol_type = other DNA
atgcaccatcatcaccatcacgggggctccggccatccggaaggtaataccccggagaaggaggtgccgagcgttatcgcccgtcatgttagtccgtacgcgtgccagcgcaagaccacgctgaataactacaacaaaaagatcaccgacgcgctggaaatcatggccgagaactacaagtttaaagagaacctgcaggcgcgcctggaggcccgtcgcgccgcgagtgtcctgaaaagcctgccgttcgaggttaccagcatgaaagacatccaaggtctgccgtgcattaccgacgacgtacgtcctgtgatcgaagagatcatcgaagtaggcgagagcagccgtgttaaagaaatcctcaatgacgagcgctacaaggcctttaagcagttcaccagcgtgttcggtgtgggcgtcaagaccgcggaaaagtggtaccgtatgggcctccgtacgctggaagaagcaaaggccagtaagagtctgaagctgaacaagatgcagaaggcgggcttcctgtactacgaggatctggcgagcggtgttagtaaagaagaagccgatgccgttctggatatcgtgaaggaaacggtgcgcactgttagtccggatgcgctggtgaccatcgccggcggtttccgccgtggcaaacctcagggccacgacgttgacctgctgatcacgattccgggccgtcctacggatccggagctgctccacaaagtggttgatctgctcaagaagcaaggtctgctgctgtacggggacatccgtgagcgtacgttcgtggaggggcaactgccaaattcgaaacctgaccagctggacaaccatcagaagtgcttcgccattctcaagctgtaccgtccgaaggtggataacagtgcggttgggacgtcgaagaaagtcgacatggctgaggttaaggattggaaagcggttcgtgtggatctggtggtcgctccagatgagcagttcgcctatgcgctgctcggttggacgggcagcggcatgtttcgtcgcgatactcgtcgctacgcggaggaagagcgcgacatgctgctcgacaaccatggtctctacgacctgaaaaagggcatctttctgagtgcggacagcgaagaagagattttcggtcatctggacctggattatctggagccgtgggaacgcaacgcg

SEQ ID NO: 6006 - protein, 394 aa, synthetic construct
  REGION 1..394: note = Variant of terminal deoxynucleotidyl transferase
MHHHHHHGGSGHPEGNTPEKEVPSVIARHVSPYACQRKTTLNNYNKKITDALEIMAENYKFKENLQARLEARRAASVLKSLPFEVTSMKDIQGLPCITDDVRPVIEEIIEVGESSRVKEILNDERYKAFKQFTSVFGVGVKTAEKWYRMGLRTLEEAKASKSLKLNKMQKAGFLYYEDLASGVSKEEADAVLDIVKETVRTVSPDALVTIAGGFRRGKPQGHDVDLLITIPGRPTDPELLHKVVDLLKKQGLLLYGDIRERTFVEGQLPNSKPDQLDNHQKCFAILKLYRPKVDNSAVGTSKKVDMAEVKDWKAVRVDLVVAPDEQFAYALLGWTGSGMFRRDTRRYAEEERDMLLDNHGLYDLKKGIFLSADSEEEIFGHLDLDYLEPWERNA

SEQ ID NO: 6007 - DNA, 1182 bp, synthetic construct
  misc_feature 1..1182: note = Variant of terminal deoxynucleotidyl transferase
  source 1..1182: mol_type = other DNA
atgcaccatcatcaccatcacgggggctccggccatccggaaggtaataccccggagaaggaggtgccgagcgttatcgcccgtcatgttagtccgtacgcgtgccagcgcaagaccacgctgaataactacaacaaaaagatcaccgacgcgctggaaatcatggccgagaactacaagtttaaagagaacctgcaggcgcgcctggaggcccgtcgcgccgcgagtgtcctgaaaagcctgccgttcgaggttaccagcatgaaagacatccaaggtctgccgtgcattaccgacgacgtacgtcctgtgatcgaagagatcatcgaagtaggcgagagcagccgtgttaaagaaatcctcaatgacgagcgctacaaggcctttaagcagttcaccagcgtgttcggtgtgggcgtcaagaccgcggaaaagtggtaccgtatgggcctccgtacgctggaagaagcaaaggccagtaagagtctgaagctgaacaagatgcagaaggcgggcttcctgtactacgaggatctggcgagcggtgttagtaaagaagaagccgatgccgttctggatatcgtgaaggaaacggtgcgcactgttagtccggatgcgctggtgaccatcgccggcggtttccgccgtggcaaacctcagggccacgacgttgacctgctgatcacgattccgggccgtcctacggatccggagctgctccacaaagtggttgatctgctcaagaagcaaggtctgctgctgtacggggacatccgtgagcgtacgttcgtggaggggcaactgccaaatcctaaacctgaccagctggacaaccatcagaagtgcttcgccattctcaagctgtaccgtccgaaggtggataacagtgcggttgggacgtcgaagaaagtcgacatggctgaggttaaggattggaaagcggttcgtgtggatctggtggtcgctccagatgagcagttcgcctatgcgctgctcggttggacgggcagcggcatgtttcgtcgcgatactcgtcgctacgcggaggaagagcgcgacatgctgctcgacaaccatggtctctacgacctgaaaaagggcatctttctgagtgcggacagcgaagaagagattttcggtcatctgaagctggattatctggagccgtgggaacgcaacgcg

SEQ ID NO: 6008 - protein, 394 aa, synthetic construct
  REGION 1..394: note = Variant of terminal deoxynucleotidyl transferase
MHHHHHHGGSGHPEGNTPEKEVPSVIARHVSPYACQRKTTLNNYNKKITDALEIMAENYKFKENLQARLEARRAASVLKSLPFEVTSMKDIQGLPCITDDVRPVIEEIIEVGESSRVKEILNDERYKAFKQFTSVFGVGVKTAEKWYRMGLRTLEEAKASKSLKLNKMQKAGFLYYEDLASGVSKEEADAVLDIVKETVRTVSPDALVTIAGGFRRGKPQGHDVDLLITIPGRPTDPELLHKVVDLLKKQGLLLYGDIRERTFVEGQLPNPKPDQLDNHQKCFAILKLYRPKVDNSAVGTSKKVDMAEVKDWKAVRVDLVVAPDEQFAYALLGWTGSGMFRRDTRRYAEEERDMLLDNHGLYDLKKGIFLSADSEEEIFGHLKLDYLEPWERNA

SEQ ID NO: 6009 - DNA, 1182 bp, synthetic construct
  misc_feature 1..1182: note = Variant of terminal deoxynucleotidyl transferase
  source 1..1182: mol_type = other DNA
atgcaccatcatcaccatcacgggggctccggccatccggaaggtaataccccggagaaggaggtgccgagcgttatcgcccgtcatgttagtccgtacgcgtgccagcgcaagaccacgctgaataactacaacaaaaagatcaccgacgcgctggaaatcatggccgagaactacaagtttaaagagaacctgcaggcgcgcctggaggcccgtcgcgccgcgagtgtcctgaaaagcctgccgttcgaggttaccagcatgaaagacatccaaggtctgccgtgcattaccgacgacgtacgtcctgtgatcgaagagatcatcgaagtaggcgagagcagccgtgttaaagaaatcctcaatgacgagcgctacaaggcctttaagcagttcaccagcgtgttcggtgtgggcgtcaagaccgcggaaaagtggtaccgtatgggcctccgtacgctggaagaagcaaaggccagtaagagtctgaagctgaacaagatgcagaaggcgggcttcctgtactacgaggatctggcgagcggtgttagtaaagaagaagccgatgccgttctggatatcgtgaaggaaacggtgcgcactgttagtccggatgcgctggtgaccatcgccggcggtttccgccgtggcaaacctcagggccacgacgttgacctgctgatcacgattccgggccgtcctacggatccggagctgctccacaaagtggttgatctgctcaagaagcaaggtctgctgctgtacggggacatccgtgagcgtacgttcgtggaggggcaactgccaaatcctaaacctgaccagctggacaaccatcagaagtgcttcgccattctcaagctgtaccgtccgaaggtggataacagtgcggttgggacgtcgaagaaagtcgacatggctgaggttaaggattggaaatgtgttcgtgtggatctggtggtcgctccagatgagcagttcgcctatgcgctgctcggttggacgggcagcggcatgtttcgtcgcgatactcgtcgctacgcggaggaagagcgcgacatgctgctcgacaaccatggtctctacgacctgaaaaagggcatctttctgagtgcggacagcgaagaagagattttcggtcatctggacctggattatctggagccgtgggaacgcaacgcg

SEQ ID NO: 6010 - protein, 394 aa, synthetic construct
  REGION 1..394: note = Variant of terminal deoxynucleotidyl transferase
MHHHHHHGGSGHPEGNTPEKEVPSVIARHVSPYACQRKTTLNNYNKKITDALEIMAENYKFKENLQARLEARRAASVLKSLPFEVTSMKDIQGLPCITDDVRPVIEEIIEVGESSRVKEILNDERYKAFKQFTSVFGVGVKTAEKWYRMGLRTLEEAKASKSLKLNKMQKAGFLYYEDLASGVSKEEADAVLDIVKETVRTVSPDALVTIAGGFRRGKPQGHDVDLLITIPGRPTDPELLHKVVDLLKKQGLLLYGDIRERTFVEGQLPNPKPDQLDNHQKCFAILKLYRPKVDNSAVGTSKKVDMAEVKDWKCVRVDLVVAPDEQFAYALLGWTGSGMFRRDTRRYAEEERDMLLDNHGLYDLKKGIFLSADSEEEIFGHLDLDYLEPWERNA

SEQ ID NO: 6011 - DNA, 1182 bp, synthetic construct
  misc_feature 1..1182: note = Variant of terminal deoxynucleotidyl transferase
  source 1..1182: mol_type = other DNA
atgcaccatcatcaccatcacgggggctccggccatccggaaggtaataccccggagaaggaggtgccgagcgttatcgcccgtcatgttagtccgtacgcgtgccagcgcaagaccacgctgaataactacaacaaaaagatcaccgacgcgctggaaatcatggccgagaactacaagtttaaagagaacctgcaggcgcgcctggaggcccgtcgcgccgcgagtgtcctgaaaagcctgccgttcgaggttaccagcatgaaagacatccaaggtctgccgtgcattaccgacgacgtacgtcctgtgatcgaagagatcatcgaagtaggcgagagcagccgtgttaaagaaatcctcaatgacgagcgctacaaggcctttaagcagttcaccagcgtgttcggtgtgggcgtcaagaccgcggaaaagtggtaccgtatgggcctccgtacgctggaagaagcaaaggccagtaagagtctgaagctgaacaagatgcagaaggcgggcttcctgtactacgaggatctggcgagcggtgttagtaaagaagaagccgatgccgttctggatatcgtgaaggaaacggtgcgcactgttagtccggatgcgctggtgaccatcgccggcggtttccgccgtggcaaacctcagggccacgacgttgacctgctgatcacgattccgggccgtcctacggatccggagctgctccacaaagtggttgatctgctcaagaagcaaggtctgctgctgtacggggacatccgtgagcgtacgttcgtggaggggcaactgccaaatcctaaacctgaccagctggacaaccatcagaagtgcttcgccattctcaagctgtaccgtccgaaggtggataacagtgcggttgggacgtcgaagaaagtcgacatggctgaggttaaggattggaaagcgactcgtgtggatctggtggtcgctccagatgagcagttcgcctatgcgctgctcggttggacgggcagcggcatgtttcgtcgcgatactcgtcgctacgcggaggaagagcgcgacatgctgctcgacaaccatggtctctacgacctgaaaaagggcatctttctgagtgcggacagcgaagaagagattttcggtcatctggacctggattatctggagccgtgggaacgcaacgcg

SEQ ID NO: 6012 - protein, 394 aa, synthetic construct
  REGION 1..394: note = Variant of terminal deoxynucleotidyl transferase
MHHHHHHGGSGHPEGNTPEKEVPSVIARHVSPYACQRKTTLNNYNKKITDALEIMAENYKFKENLQARLEARRAASVLKSLPFEVTSMKDIQGLPCITDDVRPVIEEIIEVGESSRVKEILNDERYKAFKQFTSVFGVGVKTAEKWYRMGLRTLEEAKASKSLKLNKMQKAGFLYYEDLASGVSKEEADAVLDIVKETVRTVSPDALVTIAGGFRRGKPQGHDVDLLITIPGRPTDPELLHKVVDLLKKQGLLLYGDIRERTFVEGQLPNPKPDQLDNHQKCFAILKLYRPKVDNSAVGTSKKVDMAEVKDWKATRVDLVVAPDEQFAYALLGWTGSGMFRRDTRRYAEEERDMLLDNHGLYDLKKGIFLSADSEEEIFGHLDLDYLEPWERNA

SEQ ID NO: 6013 - DNA, 1182 bp, synthetic construct
  misc_feature 1..1182: note = Variant of terminal deoxynucleotidyl transferase
  source 1..1182: mol_type = other DNA
atgcaccatcatcaccatcacgggggctccggccatccggaaggtaataccccggagaaggaggtgccgagcgttatcgcccgtcatgttagtccgtacgcgtgccagcgcaagaccacgctgaataactacaacaaaaagatcaccgacgcgctggaaatcatggccgagaactacaagtttaaagagaacctgcaggcgcgcctggaggcccgtcgcgccgcgagtgtcctgaaaagcctgccgttcgaggttaccagcatgaaagacatccaaggtctgccgtgcattaccgacgacgtacgtcctgtgatcgaagagatcatcgaagtaggcgagagcagccgtgttaaagaaatcctcaatgacgagcgctacaaggcctttaagcagttcaccagcgtgttcggtgtgggcgtcaagaccgcggaaaagtggtaccgtatgggcctccgtacgctggaagaagcaaaggccagtaagagtctgaagctgaacaagatgcagaaggcgggcttcctgtactacgaggatctggcgagcggtgttagtaaagaagaagccgatgccgttctggatatcgtgaaggaaacggtgcgcactgttagtccggatgcgctggtgaccatcgccggcggtttccgccgtggcaaacctcagggccacgacgttgacctgctgatcacgattccgggccgtcctacggatccggagctgctccacaaagtggttgatctgctcaagaagcaaggtctgctgctgtacggggacatccgtgagcgtacgttcgtggaggggcaactgccaaatcctaaacctgaccagctggacaaccatcagaagtgcttcgccattctcaagctgtaccgtccgaaggtggataacagtgcggttgggacgtcgaagaaagtcgacatggctgaggttaaggattggaaagcggttcgtgtggatctggtggtcgctccagatgagcagttcgcctatgcgctgctcggttggacgggcagcggcatgtttcgtcgcgatactcgtcgctacgcggaggaagagcgcgacatgctgctcgacaaccatggtctctacgacctgaaaaagggcatctttctgagtgcggacagcgaagaagagattttcggtcatctggacctggatattctggagccgtgggaacgcaacgcg

SEQ ID NO: 6014 - protein, 394 aa, synthetic construct
  REGION 1..394: note = Variant of terminal deoxynucleotidyl transferase
MHHHHHHGGSGHPEGNTPEKEVPSVIARHVSPYACQRKTTLNNYNKKITDALEIMAENYKFKENLQARLEARRAASVLKSLPFEVTSMKDIQGLPCITDDVRPVIEEIIEVGESSRVKEILNDERYKAFKQFTSVFGVGVKTAEKWYRMGLRTLEEAKASKSLKLNKMQKAGFLYYEDLASGVSKEEADAVLDIVKETVRTVSPDALVTIAGGFRRGKPQGHDVDLLITIPGRPTDPELLHKVVDLLKKQGLLLYGDIRERTFVEGQLPNPKPDQLDNHQKCFAILKLYRPKVDNSAVGTSKKVDMAEVKDWKAVRVDLVVAPDEQFAYALLGWTGSGMFRRDTRRYAEEERDMLLDNHGLYDLKKGIFLSADSEEEIFGHLDLDILEPWERNA

SEQ ID NO: 6015 - DNA, 1182 bp, synthetic construct
  misc_feature 1..1182: note = Variant of terminal deoxynucleotidyl transferase
  source 1..1182: mol_type = other DNA
atgcaccatcatcaccatcacgggggctccggccatccggaaggtaataccccggagaaggaggtgccgagcgttatcgcccgtcatgttagtccgtacgcgtgccagcgcaagaccacgctgaataactacaacaaaaagatcaccgacgcgctggaaatcatggccgagaactacaagtttaaagagaacctgcaggcgcgcctggaggcccgtcgcgccgcgagtgtcctgaaaagcctgccgttcgaggttaccagcatgaaagacatccaaggtctgccgtgcattaccgacgacgtacgtcctgtgatcgaagagatcatcgaagtaggcgagagcagccgtgttaaagaaatcctcaatgacgagcgctacaaggcctttaagcagttcaccaacgtgttcggtgtgggcgtcaagaccgcggaaaagtggtaccgtatgggcctccgtacgctggaagaagcaaaggccagtaagagtctgaagctgaacaagatgcagaaggcgggcttcctgtactacgaggatctggcgagcggtgttagtaaagaagaagccgatgccgttctggatatcgtgaaggaaacggtgcgcactgttagtccggatgcgctggtgaccatcgccggcggtttccgccgtggcaaacctcagggccacgacgttgacctgctgatcacgattccgggccgtcctacggatccggagctgctccacaaagtggttgatctgctcaagaagcaaggtctgctgctgtacggggacatccgtgagcgtacgttcgtggaggggcaactgccaaatcctaaacctgaccagctggacaaccatcagaagtgcttcgccattctcaagctgtaccgtccgaaggtggataacagtgcggttgggacgtcgaagaaagtcgacatggctgaggttaaggattggaaagcggttcgtgtggatctggtggtcgctccagatgagcagttcgcctatgcgctgctcggttggacgggcagcggcatgtttcgtcgcgatactcgtcgctacgcggaggaagagcgcgacatgctgctcgacaaccatggtctctacgacctgaaaaagggcatctttctgagtgcggacagcgaagaagagattttcggtcatctggacctggattatctggagccgtgggaacgcaacgcg

SEQ ID NO: 6016 - protein, 394 aa, synthetic construct
  REGION 1..394: note = Variant of terminal deoxynucleotidyl transferase
MHHHHHHGGSGHPEGNTPEKEVPSVIARHVSPYACQRKTTLNNYNKKITDALEIMAENYKFKENLQARLEARRAASVLKSLPFEVTSMKDIQGLPCITDDVRPVIEEIIEVGESSRVKEILNDERYKAFKQFTNVFGVGVKTAEKWYRMGLRTLEEAKASKSLKLNKMQKAGFLYYEDLASGVSKEEADAVLDIVKETVRTVSPDALVTIAGGFRRGKPQGHDVDLLITIPGRPTDPELLHKVVDLLKKQGLLLYGDIRERTFVEGQLPNPKPDQLDNHQKCFAILKLYRPKVDNSAVGTSKKVDMAEVKDWKAVRVDLVVAPDEQFAYALLGWTGSGMFRRDTRRYAEEERDMLLDNHGLYDLKKGIFLSADSEEEIFGHLDLDYLEPWERNA

SEQ ID NO: 6017 - DNA, 1182 bp, synthetic construct
  misc_feature 1..1182: note = Variant of terminal deoxynucleotidyl transferase
  source 1..1182: mol_type = other DNA
atgcaccatcatcaccatcacgggggctccggccatccggaaggtaataccccggagaaggaggtgccgagcgttatcgcccgtcatgttagtccgtacgcgtgccagcgcaagaccacgctgaataactacaacaaaaagatcaccgacgcgctggaaatcatggccgagaactacaagtttaaagagaacctgcaggcgcgcctggaggcccgtcgcgccgcgagtgtcctgaaaagcctgccgttcgaggttaccagcatgaaagacatccaaggtctgccgtgcattaccgacgacgtacgtcctgtgatcgaagagatcatcgaagtaggcgagagcagccgtgttaaagaaatcctcaatgacgagcgctacaaggcctttaagcagttcaccagcgtgttcggtgtgggcgtcaagaccgcggaaaagtggtaccgtatgggcctccgtacgctggaagaagcaaaggccagtaagagtctgaagctgaacaagatgcagaaggcgggcttcctgtactacgaggatctggcgagcggtgttagtaaagaagaagccgatgccgttctggatatcgtgaaggaaacggtgcgcactgttagtccggatgcgctggtgaccatcgccggcggtttccgccgtggcaaacctcagggccacgacgttgacctgctgatcacgattccgggccgtcctacggatccggagctgctccacaaagtggttgatctgctcaagaagcaaggtctgctgctgtacggggacatccgtgagcgtacgttcgtggaggggcaactgccaaatcctaaacctgaccagctggacaaccatcagaagtgcttcgccattctcaagctgtaccgtccgaaggtggataacagtgcggttgggacgtcgaagaaagtcgacatggctgaggttaaggattggaaagcggttcgtgtggatctggtggtcgctccagatgagcagttcgcctatgcgctgctcggttggacgggcagcggcatgtttcgtcgcgatactcgtcgctacgcggaggaagagcgcgacatgctgctcgacaaccatggtctctacgacgggaaaaagggcatctttctgagtgcggacagcgaagaagagattttcggtcatctggacctggattatctggagccgtgggaacgcaacgcg

SEQ ID NO: 6018 - protein, 394 aa, synthetic construct
  REGION 1..394: note = Variant of terminal deoxynucleotidyl transferase
MHHHHHHGGSGHPEGNTPEKEVPSVIARHVSPYACQRKTTLNNYNKKITDALEIMAENYKFKENLQARLEARRAASVLKSLPFEVTSMKDIQGLPCITDDVRPVIEEIIEVGESSRVKEILNDERYKAFKQFTSVFGVGVKTAEKWYRMGLRTLEEAKASKSLKLNKMQKAGFLYYEDLASGVSKEEADAVLDIVKETVRTVSPDALVTIAGGFRRGKPQGHDVDLLITIPGRPTDPELLHKVVDLLKKQGLLLYGDIRERTFVEGQLPNPKPDQLDNHQKCFAILKLYRPKVDNSAVGTSKKVDMAEVKDWKAVRVDLVVAPDEQFAYALLGWTGSGMFRRDTRRYAEEERDMLLDNHGLYDGKKGIFLSADSEEEIFGHLDLDYLEPWERNA

SEQ ID NO: 6019 - DNA, 1182 bp, synthetic construct
  misc_feature 1..1182: note = Variant of terminal deoxynucleotidyl transferase
  source 1..1182: mol_type = other DNA
atgcaccatcatcaccatcacgggggctccggccatccggaaggtaataccccggagaaggaggtgccgagcgttatcgcccgtcatgttagtccgtacgcgtgccagcgcaagaccacgctgaataactacaacaaaaagatcaccgacgcgctggaaatcatggccgagaactacaagtttaaagagaacctgcaggcgcgcctggaggcccgtcgcgccgcgagtgtcctgaaaagcctgccgttcgaggttaccagcatgaaagacatccaaggtctgccgtgcattaccgacgacgtacgtcctgtgatcgaagagatcatcgaagtaggcgagagcagccgtgttaaagaaatcctcaatgacgagcgctacaaggcctttaagcagttcaccagcgtgttcggtgtgggcgtcaagaccgcggaaaagtggtaccgtatgggcctccgtacgctggaagaagcaaaggccagtaagagtctgaagctgaacaagatgcagaaggcgggcttcctgtactacgaggatctggcgagcggtgttagtaaagaagaagccgatgccgttctggatatcgtgaaggaaacggtgcgcactgttagtccggatgcgctggtgaccatcgccggcggtttccgccgtggcaaacctcagggccacgacgttgacctgctgatcacgattccgggccgtcctacggatccggagctgctccacaaagtggttgatctgctcaagaagcaaggtctgctgctgtacggggacatccgtgagcgtacgttcgtggaggggcaactgccaaatcctaaacctgaccagctggacaaccatcagaagtgcttcgccattctcaagctgtaccgtccgaaggtggataacagtgcggttgggacgtcgaagaaagtcgacatggctgaggttaaggattggaaagcggttcgtgtggatctggtggtcgctccagatgagcagttcgcctatgcgctgctcggttggacgggcagcggcatgtttcgtcgcgatactcgtcgctacgcggaggaagagcgcgacatgctgctcgacaaccatggtctctacgacctgaaaaagggcatcttttggagtgcggacagcgaagaagagattttcggtcatctggacctggattatctggagccgtgggaacgcaacgcg

SEQ ID NO: 6020 - protein, 394 aa, synthetic construct
  REGION 1..394: note = Variant of terminal deoxynucleotidyl transferase
MHHHHHHGGSGHPEGNTPEKEVPSVIARHVSPYACQRKTTLNNYNKKITDALEIMAENYKFKENLQARLEARRAASVLKSLPFEVTSMKDIQGLPCITDDVRPVIEEIIEVGESSRVKEILNDERYKAFKQFTSVFGVGVKTAEKWYRMGLRTLEEAKASKSLKLNKMQKAGFLYYEDLASGVSKEEADAVLDIVKETVRTVSPDALVTIAGGFRRGKPQGHDVDLLITIPGRPTDPELLHKVVDLLKKQGLLLYGDIRERTFVEGQLPNPKPDQLDNHQKCFAILKLYRPKVDNSAVGTSKKVDMAEVKDWKAVRVDLVVAPDEQFAYALLGWTGSGMFRRDTRRYAEEERDMLLDNHGLYDLKKGIFWSADSEEEIFGHLDLDYLEPWERNA

SEQ ID NO: 6021 - DNA, 1182 bp, synthetic construct
  misc_feature 1..1182: note = Variant of terminal deoxynucleotidyl transferase
  source 1..1182: mol_type = other DNA
atgcaccatcatcaccatcacgggggctccggccatccggaaggtaataccccggagaaggaggtgccgagcgttatcgcccgtcatgttagtccgtacgcgtgccagcgcaagaccacgctgaataactacaacaaaaagatcaccgacgcgctggaaatcatggccgagaactacaagtttaaagagaacctgcaggcgcgcctggaggcccgtcgcgccgcgagtgtcctgaaaagcctgccgttcgaggttaccagcatgaaagacatccaaggtctgccgtgcattaccgacgacgtacgtcctgtgatcgaagagatcatcgaagtaggcgagagcagccgtgttaaagaaatcctcaatgacgagcgctacaaggcctttaagcagttcaccagcgtgttcggtgtgggcgtcaagaccgcggaaaagtggtaccgtatgggcctccgtacgctggaagaagcaaaggccagtaagagtctgaagctgaacaagatgcagaaggcgggcttcctgtactacgaggatctggcgagcggtgttagtaaagaagaagccgatgccgttctggatatcgtgaaggaaacggtgcgcactgttagtccggatgcgctggtgaccatcgccggcggtttccgccgtggcaaacctcagggccacgacgttgacctgctgatcacgattccgggccgtcctacggatccggagctgctccacaaagtggttgatctgctcaagaagcaaggtctgctgctgtacggggacatccgtgagcgtacgttcgtggaggggcaactgccaaatcctaaacctgaccagctggacaaccatcagaagtgcttcgccattctcaagctgtaccgtccgaaggtggataacagtgcggttgggacgtcgaagaaagtcgacatggctgaggttaaggattggaaagcggttcgtgtggatctggtggtcgctccagatgagcagttcgcctatgcgctgctcggttggacgggcagcggcatgtttcgtcgcgatactcgtcgctacgcggaggaagagagtgacatgctgctcgacaaccatggtctctacgacctgaaaaagggcatctttctgagtgcggacagcgaagaagagattttcggtcatctggacctggattatctggagccgtgggaacgcaacgcg

SEQ ID NO: 6022 - protein, 394 aa, synthetic construct
  REGION 1..394: note = Variant of terminal deoxynucleotidyl transferase
MHHHHHHGGSGHPEGNTPEKEVPSVIARHVSPYACQRKTTLNNYNKKITDALEIMAENYKFKENLQARLEARRAASVLKSLPFEVTSMKDIQGLPCITDDVRPVIEEIIEVGESSRVKEILNDERYKAFKQFTSVFGVGVKTAEKWYRMGLRTLEEAKASKSLKLNKMQKAGFLYYEDLASGVSKEEADAVLDIVKETVRTVSPDALVTIAGGFRRGKPQGHDVDLLITIPGRPTDPELLHKVVDLLKKQGLLLYGDIRERTFVEGQLPNPKPDQLDNHQKCFAILKLYRPKVDNSAVGTSKKVDMAEVKDWKAVRVDLVVAPDEQFAYALLGWTGSGMFRRDTRRYAEEESDMLLDNHGLYDLKKGIFLSADSEEEIFGHLDLDYLEPWERNA

SEQ ID NO: 6023 - DNA, 1182 bp, synthetic construct
  misc_feature 1..1182: note = Variant of terminal deoxynucleotidyl transferase
  source 1..1182: mol_type = other DNA
atgcaccatcatcaccatcacgggggctccggccatccggaaggtaataccccggagaaggaggtgccgagcgttatcgcccgtcatgttagtccgtacgcgtgccagcgcaagaccacgctgaataactacaacaaaaagatcaccgacgcgctggaaatcatggccgagaactacaagtttaaagagaacctgcaggcgcgcctggaggcccgtcgcgccgcgagtgtcctgaaaagcctgccgttcgaggttaccagcatgaaagacatccaaggtctgccgtgcattaccgacgacgtacgtcctgtgatcgaagagatcatcgaagtaggcgagagcagccgtgttaaagaaatcctcaatgacgagcgctacaaggcctttaagcagttcaccagcgtgttcggtgtgggcgtcaagaccgcggaaaagtggtaccgtatgggcctccgtacgctggaagaagcaaaggccagtaagagtctgaagctgaacaagatgcagaaggcgggcttcctgtactacgaggatctggcgagcggtgttagtaaagaagaagccgatgccgttctggatatcgtgaaggaaacggtgcgcactgttagtccggatgcgctggtgaccatcgccggcggtttccgccgtggcaaacctcagggccacgacgttgacctgctgatcacgattccgggccgtcctacggatccggagctgctccacaaagtggttgatctgctcaagaagcaaggtctgctgctgtacggggacatccgtgagcgtacgttcgtggaggggcaactgccaaatcctaaacctgaccagctggacaaccatcagaagtgcttcgccattctcaagctgtaccgtccgaaggtggataacagtgcggttgggacgtcgaagaaagtcgacatggctgaggttaaggattggaaagcggttcgtgtggatctggtggtcgctccagatgagcagttcgcctatgcgctgctcggttggacgggcagcggcatgtttcgtcgcgatactcgtcgctacgcggaggaagagcgcgacgcgctgctcgacaaccatggtctctacgacctgaaaaagggcatctttctgagtgcggacagcgaagaagagattttcggtcatctggacctggattatctggagccgtgggaacgcaacgcg

SEQ ID NO: 6024 - protein, 394 aa, synthetic construct
  REGION 1..394: note = Variant of terminal deoxynucleotidyl transferase
MHHHHHHGGSGHPEGNTPEKEVPSVIARHVSPYACQRKTTLNNYNKKITDALEIMAENYKFKENLQARLEARRAASVLKSLPFEVTSMKDIQGLPCITDDVRPVIEEIIEVGESSRVKEILNDERYKAFKQFTSVFGVGVKTAEKWYRMGLRTLEEAKASKSLKLNKMQKAGFLYYEDLASGVSKEEADAVLDIVKETVRTVSPDALVTIAGGFRRGKPQGHDVDLLITIPGRPTDPELLHKVVDLLKKQGLLLYGDIRERTFVEGQLPNPKPDQLDNHQKCFAILKLYRPKVDNSAVGTSKKVDMAEVKDWKAVRVDLVVAPDEQFAYALLGWTGSGMFRRDTRRYAEEERDALLDNHGLYDLKKGIFLSADSEEEIFGHLDLDYLEPWERNA

SEQ ID NO: 6025 - DNA, 1182 bp, synthetic construct
  misc_feature 1..1182: note = Variant of terminal deoxynucleotidyl transferase
  source 1..1182: mol_type = other DNA
atgcaccatcatcaccatcacgggggctccggccatccggaaggtaataccccggagaaggaggtgccgagcgttatcgcccgtcatgttagtccgtacgcgtgccagcgcaagaccacgctgaataactacaacaaaaagatcaccgacgcgctggaaatcatggccgagaactacaagtttaaagagaacctgcaggcgcgcctggaggcccgtcgcgccgcgagtgtcctgaaaagcctgccgttcgaggttaccagcatgaaagacatccaaggtctgccgtgcattaccgacgacgtacgtcctgtgatcgaagagatcatcgaagtaggcgagagcagccgtgttaaagaaatcctcaatgacgagcgctacaaggcctttaagcagttcaccagcgtgttcggtgtgggcgtcaagaccgcggaaaagtggtaccgtatgggcctccgtacgctggaagaagcaaaggccagtaagagtctgaagctgaacaagatgcagaaggcgggcttcctgtactacgaggatctggcgagcggtgttagtaaagaagaagccgatgccgttctggatatcgtgaaggaaacggtgcgcactgttagtccggatgcgctggtgaccatcgccggcggtttccgccgtggcaaacctcagggccacgacgttgacctgctgatcacgattccgggccgtcctacggatccggagctgctccacaaagtggttgatctgctcaagaagcaaggtctgctgctgtacggggacatccgtgagcgtacgttcgtggaggggcaactgccaaatcctaaacctgaccagctggacaaccatcagaagtgcttcgccattctcaagctgtaccgtccgaaggtggataacagtgcggttgggacgtcgaagaaagtcgacatggctgaggttaaggattggaaagcggttcgtgtggatctggtggtcgctccagatgagcagttcgcctatgcgctgctcggttggacgggcagcggcatgtttcgtcgcgatactcgtcgctacgcggaggaagagcgcgacatgctgctcgacaaccatggtctctacgacctgaaaaagggcatctttgttagtgcggacagcgaagaagagattttcggtcatctggacctggattatctggagccgtgggaacgcaacgcg

SEQ ID NO: 6026 - protein, 394 aa, synthetic construct
  REGION 1..394: note = Variant of terminal deoxynucleotidyl transferase
MHHHHHHGGSGHPEGNTPEKEVPSVIARHVSPYACQRKTTLNNYNKKITDALEIMAENYKFKENLQARLEARRAASVLKSLPFEVTSMKDIQGLPCITDDVRPVIEEIIEVGESSRVKEILNDERYKAFKQFTSVFGVGVKTAEKWYRMGLRTLEEAKASKSLKLNKMQKAGFLYYEDLASGVSKEEADAVLDIVKETVRTVSPDALVTIAGGFRRGKPQGHDVDLLITIPGRPTDPELLHKVVDLLKKQGLLLYGDIRERTFVEGQLPNPKPDQLDNHQKCFAILKLYRPKVDNSAVGTSKKVDMAEVKDWKAVRVDLVVAPDEQFAYALLGWTGSGMFRRDTRRYAEEERDMLLDNHGLYDLKKGIFVSADSEEEIFGHLDLDYLEPWERNA

SEQ ID NO: 6027 - DNA, 1182 bp, synthetic construct
  misc_feature 1..1182: note = Variant of terminal deoxynucleotidyl transferase
  source 1..1182: mol_type = other DNA
atgcaccatcatcaccatcacgggggctccggccatccggaaggtaataccccggagaaggaggtgccgagcgttatcgcccgtcatgttagtccgtacgcgtgccagcgcaagaccacgctgaataactacaacaaaaagatcaccgacgcgctggaaatcatggccgagaactacaagtttaaagagaacctgcaggcgcgcctggaggcccgtcgcgccgcgagtgtcctgaaaagcctgccgttcgaggttaccagcatgaaagacatccaaggtctgccgtgcattaccgacgacgtacgtcctgtgatcgaagagatcatcgaagtaggcgagagcagccgtgttaaagaaatcctcaatgacgagcgctacaaggcctttaagcagttcaccagcgtgttcggtgtgggcgtcaagaccgcggaaaagtggtaccgtatgggcctccgtacgctggaagaagcaaaggccagtaagagtctgaagctgaacaagatgcagaaggcgggcttcctgtactacgaggatctggcgagcggtgttagtaaagaagaagccgatgccgttctggatatcgtgaaggaaacggtgcgcactgttagtccggatgcgctggtgaccatcgccggcggtttccgccgtggcaaacctcagggccacgacgttgacctgctgatcacgattccgggccgtcctacggatccggagctgctccacaaagtggttgatctgctcaagaagcaaggtctgctgctgtacggggacatccgtgagcgtacgttcgtggaggggcaactgccaaatcctaaacctgaccagctggacaaccatcagaagtgcttcgccattctcaagctgtaccgtccgaaggtggataacagtgcggttgggacgtcgaagaaagtcgacatggctgaggttaaggattggaaagcggttcgtgtggatctggtggtcgctccagatgagcagttcgcctatgcgctgctcggttggacgggcagcggcatgtttcgtcgcgatactcgtcgctacgcggaggaagctcgcgacatgctgctcgacaaccatggtctctacgacctgaaaaagggcatctttctgagtgcggacagcgaagaagagattttcggtcatctggacctggattatctggagccgtgggaacgcaacgcg

SEQ ID NO: 6028 - protein, 394 aa, synthetic construct
  REGION 1..394: note = Variant of terminal deoxynucleotidyl transferase
MHHHHHHGGSGHPEGNTPEKEVPSVIARHVSPYACQRKTTLNNYNKKITDALEIMAENYKFKENLQARLEARRAASVLKSLPFEVTSMKDIQGLPCITDDVRPVIEEIIEVGESSRVKEILNDERYKAFKQFTSVFGVGVKTAEKWYRMGLRTLEEAKASKSLKLNKMQKAGFLYYEDLASGVSKEEADAVLDIVKETVRTVSPDALVTIAGGFRRGKPQGHDVDLLITIPGRPTDPELLHKVVDLLKKQGLLLYGDIRERTFVEGQLPNPKPDQLDNHQKCFAILKLYRPKVDNSAVGTSKKVDMAEVKDWKAVRVDLVVAPDEQFAYALLGWTGSGMFRRDTRRYAEEARDMLLDNHGLYDLKKGIFLSADSEEEIFGHLDLDYLEPWERNA

SEQ ID NO: 6029 - DNA, 1182 bp, synthetic construct
  misc_feature 1..1182: note = Variant of terminal deoxynucleotidyl transferase
  source 1..1182: mol_type = other DNA
atgcaccatcatcaccatcacgggggctccggccatccggaaggtaataccccggagaaggaggtgccgagcgttatcgcccgtcatgttagtccgtacgcgtgccagcgcaagaccacgctgaataactacaacaaaaagatcaccgacgcgctggaaatcatggccgagaactacaagtttaaagagaacctgcaggcgcgcctggaggcccgtcgcgccgcgagtgtcctgaaaagcctgccgttcgaggttaccagcatgaaagacatccaaggtctgccgtgcattaccgacgacgtacgtcctgtgatcgaagagatcatcgaagtaggcgagagcagccgtgttaaagaaatcctcaatgacgagcgctacaaggcctttaagcagttcaccagcgtgttcggtgtgggcgtcaagaccgcggaaaagtggtaccgtatgggcctccgtacgctggaagaagcaaaggccagtaagagtctgaagctgaacaagatgcagaaggcgggcttcctgtactacgaggatctggcgagcggtgttagtaaagaagaagccgatgccgttctggatatcgtgaaggaaacggtgcgcactgttagtccggatgcgctggtgaccatcgccggcggtttccgccgtggcaaacctcagggccacgacgttgacctgctgatcacgattccgggccgtcctacggatccggagctgctccacaaagtggttgatctgctcaagaagcaaggtctgctgctgtacggggacatccgtgagcgtacgttcgtggaggggcaactgccaaatcctaaacctgaccagctggacaaccatcagaagtgcttcgccattctcaagctgtaccgtccgaaggtggataacagtgcggttgggacgtcgaagaaagtcgacatggctgaggttaaggattggaaagcggttcgtgtggatctggtggtcgctccagatgagcagttcgcctatgcgctgctcggttggacgggcagcggcatgtttcgtcgcgatactcgtcgctacgcggaggaagagcgcgacatgctgctcgacaaccatggtctctacgacctgaaaaagggcatctttctgagtgcggacagcgaagaagagattttcggtcatctggacctggattatctggagccgtggtatcgcaacgcg

SEQ ID NO: 6030 - protein, 394 aa, synthetic construct
  REGION 1..394: note = Variant of terminal deoxynucleotidyl transferase
MHHHHHHGGSGHPEGNTPEKEVPSVIARHVSPYACQRKTTLNNYNKKITDALEIMAENYKFKENLQARLEARRAASVLKSLPFEVTSMKDIQGLPCITDDVRPVIEEIIEVGESSRVKEILNDERYKAFKQFTSVFGVGVKTAEKWYRMGLRTLEEAKASKSLKLNKMQKAGFLYYEDLASGVSKEEADAVLDIVKETVRTVSPDALVTIAGGFRRGKPQGHDVDLLITIPGRPTDPELLHKVVDLLKKQGLLLYGDIRERTFVEGQLPNPKPDQLDNHQKCFAILKLYRPKVDNSAVGTSKKVDMAEVKDWKAVRVDLVVAPDEQFAYALLGWTGSGMFRRDTRRYAEEERDMLLDNHGLYDLKKGIFLSADSEEEIFGHLDLDYLEPWYRNA

SEQ ID NO: 6031 - DNA, 1182 bp, synthetic construct
  misc_feature 1..1182: note = Variant of terminal deoxynucleotidyl transferase
  source 1..1182: mol_type = other DNA
atgcaccatcatcaccatcacgggggctccggccatccggaaggtaataccccggagaaggaggtgccgagcgttatcgcccgtcatgttagtccgtacgcgtgccagcgcaagaccacgctgaataactacaacaaaaagatcaccgacgcgctggaaatcatggccgagaactacaagtttaaagagaacctgcaggcgcgcctggaggcccgtcgcgccgcgagtgtcctgaaaagcctgccgttcgaggttaccagcatgaaagacatccaaggtctgccgtgcattaccgacgacgtacgtcctgtgatcgaagagatcatcgaagtaggcgagagcagccgtgttaaagaaatcctcaatgacgagcgctacaaggcctttaagcagttcaccagcgtgttcggtgtgggcgtcaagaccgcggaaaagtggtaccgtatgggcctccgtacgctggaagaagcaaaggccagtaagagtctgaagctgaacaagatgcagaaggcgggcttcctgtactacgaggatctggcgagcggtgttagtaaagaagaagccgatgccgttctggatatcgtgaaggaaacggtgcgcactgttagtccggatgcgctggtgaccatcgccggcggtttccgccgtggcaaacctcagggccacgacgttgacctgctgatcacgattccgggccgtcctacggatccggagctgctccacaaagtggttgatctgctcaagaagcaaggtctgctgctgtacggggacatccgtgagcgtacgttcgtggaggggcaactgccaaatcctaaacctgaccagctggacaaccatcagaagtgcttcgccattctcaagctgtaccgtccgaaggtggataacagtgcggttgggacgtcgaagaaagtcgacatggctgaggttaaggattggaaagcggttcgtgtggatctggtggtcgctccagatgagcagttcgcctatgcgctgctcggttggacgggcagcggcatgtttcgtcgcgatactcgtcgctacgcggaggaagagcgcgacatgctgctcgacaaccatggtctctacgacctgaaagagggcatctttctgagtgcggacagcgaagaagagattttcggtcatctggacctggattatctggagccgtgggaacgcaacgcg

SEQ ID NO: 6032 - protein, 394 aa, synthetic construct
  REGION 1..394: note = Variant of terminal deoxynucleotidyl transferase
MHHHHHHGGSGHPEGNTPEKEVPSVIARHVSPYACQRKTTLNNYNKKITDALEIMAENYKFKENLQARLEARRAASVLKSLPFEVTSMKDIQGLPCITDDVRPVIEEIIEVGESSRVKEILNDERYKAFKQFTSVFGVGVKTAEKWYRMGLRTLEEAKASKSLKLNKMQKAGFLYYEDLASGVSKEEADAVLDIVKETVRTVSPDALVTIAGGFRRGKPQGHDVDLLITIPGRPTDPELLHKVVDLLKKQGLLLYGDIRERTFVEGQLPNPKPDQLDNHQKCFAILKLYRPKVDNSAVGTSKKVDMAEVKDWKAVRVDLVVAPDEQFAYALLGWTGSGMFRRDTRRYAEEERDMLLDNHGLYDLKEGIFLSADSEEEIFGHLDLDYLEPWERNA

SEQ ID NO: 6033 - DNA, 1182 bp, synthetic construct
  misc_feature 1..1182: note = Variant of terminal deoxynucleotidyl transferase
  source 1..1182: mol_type = other DNA
atgcaccatcatcaccatcacgggggctccggccatccggaaggtaataccccggagaaggaggtgccgagcgttatcgcccgtcatgttagtccgtacgcgtgccagcgcaagaccacgctgaataactacaacaaaaagatcaccgacgcgctggaaatcatggccgagaactacaagtttaaagagaacctgcaggcgcgcctggaggcccgtcgcgccgcgagtgtcctgaaaagcctgccgttcgaggttaccagcatgaaagacatccaaggtctgccgtgcattaccgacgacgtacgtcctgtgatcgaagagatcatcgaagtaggcgagagcagccgtgttaaagaaatcctcaatgacgagcgctacaaggcctttaagcagttcaccagcgtgttcggtgtgggcgtcaagaccgcggaaaagtggtaccgtatgggcctccgtacgctggaagaagcaaaggccagtaagagtctgaagctgaacaagatgcagaaggcgggcttcctgtactacgaggatctggcgagcggtgttagtaaagaagaagccgatgccgttctggatatcgtgaaggaaacggtgcgcactgttagtccggatgcgctggtgaccatcgccggcggtttccgccgtggcaaacctcagggccacgacgttgacctgctgatcacgattccgggccgtcctacggatccggagctgctccacaaagtggttgatctgctcaagaagcaaggtctgctgctgtacggggacatccgtgagcgtacgttcgtggaggggcaactgccaaatcctaaacctgaccagctggacaaccatcagaagtgcttcgccattctcaagctgtaccgtccgaaggtggataacagtgcggttgggacgtcgaagaaagtcgacatggctgaggttaaggattggaaagcggttcgtgtggatctggtggtcgctccagatgagcagttcgcctatgcgctgctcggttggacgggcagcggcatgtttcgtcgcgatactcgtcgctacgcggaggaagagcgcgacatgctgctcgacaaccatggtctctacgacctgaaaaagggcatctttctgagtgcggacagcgaagaagagattttcggtcatctggacctggatcttctggagccgtgggaacgcaacgcg

SEQ ID NO: 6034 - protein, 394 aa, synthetic construct
  REGION 1..394: note = Variant of terminal deoxynucleotidyl transferase
MHHHHHHGGSGHPEGNTPEKEVPSVIARHVSPYACQRKTTLNNYNKKITDALEIMAENYKFKENLQARLEARRAASVLKSLPFEVTSMKDIQGLPCITDDVRPVIEEIIEVGESSRVKEILNDERYKAFKQFTSVFGVGVKTAEKWYRMGLRTLEEAKASKSLKLNKMQKAGFLYYEDLASGVSKEEADAVLDIVKETVRTVSPDALVTIAGGFRRGKPQGHDVDLLITIPGRPTDPELLHKVVDLLKKQGLLLYGDIRERTFVEGQLPNPKPDQLDNHQKCFAILKLYRPKVDNSAVGTSKKVDMAEVKDWKAVRVDLVVAPDEQFAYALLGWTGSGMFRRDTRRYAEEERDMLLDNHGLYDLKKGIFLSADSEEEIFGHLDLDLLEPWERNA

SEQ ID NO: 6035 - DNA, 1182 bp, synthetic construct
  misc_feature 1..1182: note = Variant of terminal deoxynucleotidyl transferase
  source 1..1182: mol_type = other DNA
atgcaccatcatcaccatcacgggggctccggccatccggaaggtaataccccggagaaggaggtgccgagcgttatcgcccgtcatgttagtccgtacgcgtgccagcgcaagaccacgctgaataactacaacaaaaagatcaccgacgcgctggaaatcatggccgagaactacaagtttaaagagaacctgcaggcgcgcctggaggcccgtcgcgccgcgagtgtcctgaaaagcctgccgttcgaggttaccagcatgaaagacatccaaggtctgccgtgcattaccgacgacgtacgtcctgtgatcgaagagatcatcgaagtaggcgagagcagccgtgttaaagaaatcctcaatgacgagcgctacaaggcctttaagcagttcaccagcgtgttcggtgtgggcgtcaagaccgcggaaaagtggtaccgtatgggcctccgtacgctggaagaagcaaaggccagtaagagtctgaagctgaacaagatgcagaaggcgggcttcctgtactacgaggatctggcgagcggtgttagtaaagaagaagccgatgccgttctggatatcgtgaaggaaacggtgcgcactgttagtccggatgcgctggtgaccatcgccggcggtttccgccgtggcaaacctcagggccacgacgttgacctgctgatcacgattccgggccgtcctacggatccggagctgctccacaaagtggttgatctgctcaagaagcaaggtctgctgctgtacggggacatccgtgagcgtacgttcgtggaggggcaactgccaaatcctaaacctgaccagctggacaaccatcagaagtgcttcgccattctcaagctgtaccgtccgaaggtggataacagtgcggttgggacgtcgaagaaagtcgacatggctgaggttaaggattggaaagcggttcgtgtggatctggtggtcgctccagatgagcagttcgcctatgcgctgctcggttggacgggcagcggcatgtttcgtcgcgatactcgtcgctacgcggaggaagagcgcgacatgctgtgtgacaaccatggtctctacgacctgaaaaagggcatctttctgagtgcggacagcgaagaagagattttcggtcatctggacctggattatctggagccgtgggaacgcaacgcg

SEQ ID NO: 6036 - protein, 394 aa, synthetic construct
  REGION 1..394: note = Variant of terminal deoxynucleotidyl transferase
MHHHHHHGGSGHPEGNTPEKEVPSVIARHVSPYACQRKTTLNNYNKKITDALEIMAENYKFKENLQARLEARRAASVLKSLPFEVTSMKDIQGLPCITDDVRPVIEEIIEVGESSRVKEILNDERYKAFKQFTSVFGVGVKTAEKWYRMGLRTLEEAKASKSLKLNKMQKAGFLYYEDLASGVSKEEADAVLDIVKETVRTVSPDALVTIAGGFRRGKPQGHDVDLLITIPGRPTDPELLHKVVDLLKKQGLLLYGDIRERTFVEGQLPNPKPDQLDNHQKCFAILKLYRPKVDNSAVGTSKKVDMAEVKDWKAVRVDLVVAPDEQFAYALLGWTGSGMFRRDTRRYAEEERDMLCDNHGLYDLKKGIFLSADSEEEIFGHLDLDYLEPWERNA

SEQ ID NO: 6037 - DNA, 1182 bp, synthetic construct
  misc_feature 1..1182: note = Variant of terminal deoxynucleotidyl transferase
  source 1..1182: mol_type = other DNA
atgcaccatcatcaccatcacgggggctccggccatccggaaggtaataccccggagaaggaggtgccgagcgttatcgcccgtcatgttagtccgtacgcgtgccagcgcaagaccacgctgaataactacaacaaaaagatcaccgacgcgctggaaatcatggccgagaactacaagtttaaagagaacctgcaggcgcgcctggaggcccgtcgcgccgcgagtgtcctgaaaagcctgccgttcgaggttaccagcatgaaagacatccaaggtctgccgtgcattaccgacgacgtacgtcctgtgatcgaagagatcatcgaagtaggcgagagcagccgtgttaaagaaatcctcaatgacgagcgctacaaggcctttaagcagttcaccagcgtgttcggtgtgggcgtcaagaccgcggaaaagtggtaccgtatgggcctccgtacgctggaagaagcaaaggccagtaagagtctgaagctgaacaagatgcagaaggcgggcttcctgtactacgaggatctggcgagcggtgttagtaaagaagaagccgatgccgttctggatatcgtgaaggaaacggtgcgcactgttagtccggatgcgctggtgaccatcgccggcggtttccgccgtggcaaacctcagggccacgacgttgacctgctgatcacgattccgggccgtcctacggatccggagctgctccacaaagtggttgatctgctcaagaagcaaggtctgctgctgtacggggacatccgtgagcgtacgttcgtggaggggcaactgccaaatcctaaacctgaccagctggacaaccatcagaagtgcttcgccattctcaagctgtaccgtccgaaggtggataacagtgcggttgggacgtcgaagaaagtcgacatggctgaggttaaggattggaaagcggttcgtgtggatctggtggtcgctccagatgagcagttcgcctatgcgctgctcggttggacgggcagcggcatgtttcgtcgcgatactcgtcgctacgcggaggaagagcgcgacatgctgctcgacaaccatggtctctacgacctgaaaaagggcatctttctgagtgcggacagcgaagaacgtattttcggtcatctggacctggattatctggagccgtgggaacgcaacgcg

SEQ ID NO: 6038 - protein, 394 aa, synthetic construct
  REGION 1..394: note = Variant of terminal deoxynucleotidyl transferase
MHHHHHHGGSGHPEGNTPEKEVPSVIARHVSPYACQRKTTLNNYNKKITDALEIMAENYKFKENLQARLEARRAASVLKSLPFEVTSMKDIQGLPCITDDVRPVIEEIIEVGESSRVKEILNDERYKAFKQFTSVFGVGVKTAEKWYRMGLRTLEEAKASKSLKLNKMQKAGFLYYEDLASGVSKEEADAVLDIVKETVRTVSPDALVTIAGGFRRGKPQGHDVDLLITIPGRPTDPELLHKVVDLLKKQGLLLYGDIRERTFVEGQLPNPKPDQLDNHQKCFAILKLYRPKVDNSAVGTSKKVDMAEVKDWKAVRVDLVVAPDEQFAYALLGWTGSGMFRRDTRRYAEEERDMLLDNHGLYDLKKGIFLSADSEERIFGHLDLDYLEPWERNA

SEQ ID NO: 6039 - DNA, 1182 bp, synthetic construct
  misc_feature 1..1182: note = Variant of terminal deoxynucleotidyl transferase
  source 1..1182: mol_type = other DNA
atgcaccatcatcaccatcacgggggctccggccatccggaaggtaataccccggagaaggaggtgccgagcgttatcgcccgtcatgttagtccgtacgcgtgccagcgcaagaccacgctgaataactacaacaaaaagatcaccgacgcgctggaaatcatggccgagaactacaagtttaaagagaacctgcaggcgcgcctggaggcccgtcgcgccgcgagtgtcctgaaaagcctgccgttcgaggttaccagcatgaaagacatccaaggtctgccgtgcattaccgacgacgtacgtcctgtgatcgaagagatcatcgaagtaggcgagagcagccgtgttaaagaaatcctcaatgacgagcgctacaaggcctttaagcagttcaccagcgtgttcggtgtgggcgtcaagaccgcggaaaagtggtaccgtatgggcctccgtacgctggaagaagcaaaggccagtaagagtctgaagctgaacaagatgcagaaggcgggcttcctgtactacgaggatctggcgagcggtgttagtaaagaagaagccgatgccgttctggatatcgtgaaggaaacggtgcgcactgttagtccggatgcgctggtgaccatcgccggcggtttccgccgtggcaaacctcagggccacgacgttgacctgctgatcacgattccgggccgtcctacggatccggagctgctccacaaagtggttgatctgctcaagaagcaaggtctgctgctgtacggggacatccgtgagcgtacgttcgtggaggggcaactgccaaatcctaaacctgaccagctggacaaccatcagaagtgcttcgccattctcaagctgtaccgtccgaaggtggataacagtgcggttgggacgtcgaagaaagtcgacatggctgaggttaaggattggaaagcggttcgtgtggatctggtggtcgctccagatgagcagttcgcctatgcgctgctcggttggacgggcagcggcatgtttcgtcgcgatactcgtcgctacgcggaggaagagcgcgacatgctgctcgacaaccatggtctctacgacctgaaaaagggcatctttctgagtgcggacagcgaagaagagattttcggtcatctggacctggattatctggagccgtgggggcgcaacgcg

SEQ ID NO: 6040 - protein, 394 aa, synthetic construct
  REGION 1..394: note = Variant of terminal deoxynucleotidyl transferase
MHHHHHHGGSGHPEGNTPEKEVPSVIARHVSPYACQRKTTLNNYNKKITDALEIMAENYKFKENLQARLEARRAASVLKSLPFEVTSMKDIQGLPCITDDVRPVIEEIIEVGESSRVKEILNDERYKAFKQFTSVFGVGVKTAEKWYRMGLRTLEEAKASKSLKLNKMQKAGFLYYEDLASGVSKEEADAVLDIVKETVRTVSPDALVTIAGGFRRGKPQGHDVDLLITIPGRPTDPELLHKVVDLLKKQGLLLYGDIRERTFVEGQLPNPKPDQLDNHQKCFAILKLYRPKVDNSAVGTSKKVDMAEVKDWKAVRVDLVVAPDEQFAYALLGWTGSGMFRRDTRRYAEEERDMLLDNHGLYDLKKGIFLSADSEEEIFGHLDLDYLEPWGRNA

SEQ ID NO: 6041 - DNA, 1182 bp, synthetic construct
  misc_feature 1..1182: note = Variant of terminal deoxynucleotidyl transferase
  source 1..1182: mol_type = other DNA
atgcaccatcatcaccatcacgggggctccggccatccggaaggtaataccccggagaaggaggtgccgagcgttatcgcccgtcatgttagtccgtacgcgtgccagcgcaagaccacgctgaataactacaacaaaaagatcaccgacgcgctggaaatcatggccgagaactacaagtttaaagagaacctgcaggcgcgcctggaggcccgtcgcgccgcgagtgtcctgaaaagcctgccgttcgaggttaccagcatgaaagacatccaaggtctgccgtgcattaccgacgacgtacgtcctgtgatcgaagagatcatcgaagtaggcgagagcagccgtgttaaagaaatcctcaatgacgagcgctacaaggcctttaagcagttcaccagcgtgttcggtgtgggcgtcaagaccgcggaaaagtggtaccgtatgggcctccgtacgctggaagaagcaaaggccagtaagagtctgaagctgaacaagatgcagaaggcgggcttcctgtactacgaggatctggcgagcggtgttagtaaagaagaagccgatgccgttctggatatcgtgaaggaaacggtgcgcactgttagtccggatgcgctggtgaccatcgccggcggtttccgccgtggcaaacctcagggccacgacgttgacctgctgatcacgattccgggccgtcctacggatccggagcagctccacaaagtggttgatctgctcaagaagcaaggtctgctgctgtacggggacatccgtgagcgtacgttcgtggaggggcaactgccaaatcctaaacctgaccagctggacaaccatcagaagtgcttcgccattctcaagctgtaccgtccgaaggtggataacagtgcggttgggacgtcgaagaaagtcgacatggctgaggttaaggattggaaagcggttcgtgtggatctggtggtcgctccagatgagcagttcgcctatgcgctgctcggttggacgggcagcggcatgtttcgtcgcgatactcgtcgctacgcggaggaagagcgcgacatgctgctcgacaaccatggtctctacgacctgaaaaagggcatctttctgagtgcggacagcgaagaagagattttcggtcatctggacctggattatctggagccgtgggaacgcaacgcg

SEQ ID NO: 6042 - protein, 394 aa, synthetic construct
  REGION 1..394: note = Variant of terminal deoxynucleotidyl transferase
MHHHHHHGGSGHPEGNTPEKEVPSVIARHVSPYACQRKTTLNNYNKKITDALEIMAENYKFKENLQARLEARRAASVLKSLPFEVTSMKDIQGLPCITDDVRPVIEEIIEVGESSRVKEILNDERYKAFKQFTSVFGVGVKTAEKWYRMGLRTLEEAKASKSLKLNKMQKAGFLYYEDLASGVSKEEADAVLDIVKETVRTVSPDALVTIAGGFRRGKPQGHDVDLLITIPGRPTDPEQLHKVVDLLKKQGLLLYGDIRERTFVEGQLPNPKPDQLDNHQKCFAILKLYRPKVDNSAVGTSKKVDMAEVKDWKAVRVDLVVAPDEQFAYALLGWTGSGMFRRDTRRYAEEERDMLLDNHGLYDLKKGIFLSADSEEEIFGHLDLDYLEPWERNA

SEQ ID NO: 6043 - DNA, 1182 bp, synthetic construct
  misc_feature 1..1182: note = Variant of terminal deoxynucleotidyl transferase
  source 1..1182: mol_type = other DNA
atgcaccatcatcaccatcacgggggctccggccatccggaaggtaataccccggagaaggaggtgccgagcgttatcgcccgtcatgttagtccgtacgcgtgccagcgcaagaccacgctgaataactacaacaaaaagatcaccgacgcgctggaaatcatggccgagaactacaagtttaaagagaacctgcaggcgcgcctggaggcccgtcgcgccgcgagtgtcctgaaaagcctgccgttcgaggttaccagcatgaaagacatccaaggtctgccgtgcattaccgacgacgtacgtcctgtgatcgaagagatcatcgaagtaggcgagagcagccgtgttaaagaaatcctcaatgacgagcgctacaaggcctttaagcagttcaccagcgtgttcggtgtgggcgtcaagaccgcggaaaagtggtaccgtatgggcctccgtacgctggaagaagcaaaggccagtaagagtctgaagctgaacaagatgcagaaggcgggcttcctgtactacgaggatctggcgagcggtgttagtaaagaagaagccgatgccgttctggatatcgtgaaggaaacggtgcgcactgttagtccggatgcgctggtgaccatcgccggcggtttccgccgtggcaaacctcagggccacgacgttgacctgctgatcacgattccgggccgtcctacggatccggagctgctccacaaagtggttgatctgctcaagaagcaaggtctgctgctgtacggggacatccgtgagcgtacgttcgtggaggggcaactgccaaatcctaaacctgaccagctggacaaccatcagaagtgcttcgccattctcaagctgtaccgtccgaaggtggataacagtgcggttgggacgtcgaagaaagtcgacatggctgaggttaaggattggaaagcggttcgtgtggatctggtggtcgctccagatgagcagttcgcctatgcgctgctcggttggacgggcagcggcatgtttcgtcgcgatactcgtcgctacgcggaggaagagcgcgacatgctgctcgacaaccatggtctctacgacctgaaaaagggcatctttctgagtgcggacagcgaagaagaggttttcggtcatctggacctggattatctggagccgtgggaacgcaacgcg

SEQ ID NO: 6044 - protein, 394 aa, synthetic construct
  REGION 1..394: note = Variant of terminal deoxynucleotidyl transferase
MHHHHHHGGSGHPEGNTPEKEVPSVIARHVSPYACQRKTTLNNYNKKITDALEIMAENYKFKENLQARLEARRAASVLKSLPFEVTSMKDIQGLPCITDDVRPVIEEIIEVGESSRVKEILNDERYKAFKQFTSVFGVGVKTAEKWYRMGLRTLEEAKASKSLKLNKMQKAGFLYYEDLASGVSKEEADAVLDIVKETVRTVSPDALVTIAGGFRRGKPQGHDVDLLITIPGRPTDPELLHKVVDLLKKQGLLLYGDIRERTFVEGQLPNPKPDQLDNHQKCFAILKLYRPKVDNSAVGTSKKVDMAEVKDWKAVRVDLVVAPDEQFAYALLGWTGSGMFRRDTRRYAEEERDMLLDNHGLYDLKKGIFLSADSEEEVFGHLDLDYLEPWERNA

SEQ ID NO: 6045 - DNA, 1182 bp, synthetic construct
  misc_feature 1..1182: note = Variant of terminal deoxynucleotidyl transferase
  source 1..1182: mol_type = other DNA
atgcaccatcatcaccatcacgggggctccggccatccggaaggtaataccccggagaaggaggtgccgagcgttatcgcccgtcatgttagtccgtacgcgtgccagcgcaagaccacgctgaataactacaacaaaaagatcaccgacgcgctggaaatcatggccgagaactacaagtttaaagagaacctgcaggcgcgcctggaggcccgtcgcgccgcgagtgtcctgaaaagcctgccgttcgaggttaccagcatgaaagacatccaaggtctgccgtgcattaccgacgacgtacgtcctgtgatcgaagagatcatcgaagtaggcgagagcagccgtgttaaagaaatcctcaatgacgagcgctacaaggcctttaagcagttcaccagcgtgttcggtgtgggcgtcaagaccgcggaaaagtggtaccgtatgggcctccgtacgctggaagaagcaaaggccagtaagagtctgaagctgaacaagatgcagaaggcgggcttcctgtactacgaggatctggcgagcggtgttagtaaagaagaagccgatgccgttctggatatcgtgaaggaaacggtgcgcactgttagtccggatgcgctggtgaccatcgccggcggtttccgccgtggcaaacctcagggccacgacgttgacctgctgatcacgattccgggccgtcctacggatccggagctgctccacaaagtggttgatctgctcaagaagcaaggtctgctgctgtacggggacatccgtgagcgtacgttcgtggaggggcaactgccaaatcctaaacctgaccagctggacaaccatcagaagtgcttcgccattctcaagctgtaccgtccgaaggtggataacagtgcggttgggacgtcgaagaaagtcgacatggctgaggttaaggattggaaagcggttcgtgtggatctggtggaggctccagatgagcagttcgcctatgcgctgctcggttggacgggcagcggcatgtttcgtcgcgatactcgtcgctacgcggaggaagagcgcgacatgctgctcgacaaccatggtctctacgacctgaaaaagggcatctttctgagtgcggacagcgaagaagagattttcggtcatctggacctggattatctggagccgtgggaacgcaacgcg

SEQ ID NO: 6046 - protein, 394 aa, synthetic construct
  REGION 1..394: note = Variant of terminal deoxynucleotidyl transferase
MHHHHHHGGSGHPEGNTPEKEVPSVIARHVSPYACQRKTTLNNYNKKITDALEIMAENYKFKENLQARLEARRAASVLKSLPFEVTSMKDIQGLPCITDDVRPVIEEIIEVGESSRVKEILNDERYKAFKQFTSVFGVGVKTAEKWYRMGLRTLEEAKASKSLKLNKMQKAGFLYYEDLASGVSKEEADAVLDIVKETVRTVSPDALVTIAGGFRRGKPQGHDVDLLITIPGRPTDPELLHKVVDLLKKQGLLLYGDIRERTFVEGQLPNPKPDQLDNHQKCFAILKLYRPKVDNSAVGTSKKVDMAEVKDWKAVRVDLVEAPDEQFAYALLGWTGSGMFRRDTRRYAEEERDMLLDNHGLYDLKKGIFLSADSEEEIFGHLDLDYLEPWERNA

SEQ ID NO: 6047 - DNA, 1182 bp, synthetic construct
  misc_feature 1..1182: note = Variant of terminal deoxynucleotidyl transferase
  source 1..1182: mol_type = other DNA
atgcaccatcatcaccatcacgggggctccggccatccggaaggtaataccccggagaaggaggtgccgagcgttatcgcccgtcatgttagtccgtacgcgtgccagcgcaagaccacgctgaataactacaacaaaaagatcaccgacgcgctggaaatcatggccgagaactacaagtttaaagagaacctgcaggcgcgcctggaggcccgtcgcgccgcgagtgtcctgaaaagcctgccgttcgaggttaccagcatgaaagacatccaaggtctgccgtgcattaccgacgacgtacgtcctgtgatcgaagagatcatcgaagtaggcgagagcagccgtgttaaagaaatcctcaatgacgagcgctacaaggcctttaagcagttcaccagcgtgttcggtgtgggcgtcaagaccgcggaaaagtggtaccgtatgggcctccgtacgctggaagaagcaaaggccagtaagagtctgaagctgaacaagatgcagaaggcgggcttcctgtactacgaggatctggcgagcggtgttagtaaagaagaagccgatgccgttctggatatcgtgaaggaaacggtgcgcactgttagtccggatgcgctggtgaccatcgccggcggtttccgccgtggcaaacctcagggccacgacgttgacctgctgatcacgattccgggccgtcctacggatccggagctgctccacaaagtggttgatctgctcaagaagcaaggtctgctgctgtacggggacatccgtgagcgtacgttcgtggaggggcaactgccaaatcctaaacctgaccagctggacaaccatcagaagtgcttcgccattctcaagctgtaccgtccgaaggtggataacagtgcggttgggacgtcgaagaaagtcgacatggctgaggttaaggattggaaagcggttcgtgtggatctggtggtcgctccagatgagcagttcgcctatgcgctgctcggttggacgggcagcggcatgtttcgtcgcgatactcgtcgctacgcggaggaagagcgcgacatgctgctcgacaaccatggtctctacgacctgaaaacgggcatctttctgagtgcggacagcgaagaagagattttcggtcatctggacctggattatctggagccgtgggaacgcaacgcg

SEQ ID NO: 6048 - protein, 394 aa, synthetic construct
  REGION 1..394: note = Variant of terminal deoxynucleotidyl transferase
MHHHHHHGGSGHPEGNTPEKEVPSVIARHVSPYACQRKTTLNNYNKKITDALEIMAENYKFKENLQARLEARRAASVLKSLPFEVTSMKDIQGLPCITDDVRPVIEEIIEVGESSRVKEILNDERYKAFKQFTSVFGVGVKTAEKWYRMGLRTLEEAKASKSLKLNKMQKAGFLYYEDLASGVSKEEADAVLDIVKETVRTVSPDALVTIAGGFRRGKPQGHDVDLLITIPGRPTDPELLHKVVDLLKKQGLLLYGDIRERTFVEGQLPNPKPDQLDNHQKCFAILKLYRPKVDNSAVGTSKKVDMAEVKDWKAVRVDLVVAPDEQFAYALLGWTGSGMFRRDTRRYAEEERDMLLDNHGLYDLKTGIFLSADSEEEIFGHLDLDYLEPWERNA

SEQ ID NO: 6049 - DNA, 1182 bp, synthetic construct
  misc_feature 1..1182: note = Variant of terminal deoxynucleotidyl transferase
  source 1..1182: mol_type = other DNA
atgcaccatcatcaccatcacgggggctccggccatccggaaggtaataccccggagaaggaggtgccgagcgttatcgcccgtcatgttagtccgtacgcgtgccagcgcaagaccacgctgaataactacaacaaaaagatcaccgacgcgctggaaatcatggccgagaactacaagtttaaagagaacctgcaggcgcgcctggaggcccgtcgcgccgcgagtgtcctgaaaagcctgccgttcgaggttaccagcatgaaagacatccaaggtctgccgtgcattaccgacgacgtacgtcctgtgatcgaagagatcatcgaagtaggcgagagcagccgtgttaaagaaatcctcaatgacgagcgctacaaggcctttaagcagttcaccagcgtgttcggtgtgggcgtcaagaccgcggaaaagtggtaccgtatgggcctccgtacgctggaagaagcaaaggccagtaagagtctgaagctgaacaagatgcagaaggcgggcttcctgtactacgaggatctggcgagcggtgttagtaaagaagaagccgatgccgttctggatatcgtgaaggaaacggtgcgcactgttagtccggatgcgctggtgaccatcgccggcggtttccgccgtggcaaacctcagggccacgacgttgacctgctgatcacgattccgggccgtcctacggatccggagctgctccacaaagtggttgatctgctcaagaagcaaggtctgctgctgtacggggacatccgtgagcgtacgttcgtggaggggcaactgccaaatcctaaacctgaccagctggacaaccatcagaagtgcttcgccattctcaagctgtaccgtccgaaggtggataacagtgcggttgggacgtcgaagaaagtcgacatggctgaggttaaggattggaaagcggttcgtgtggatctggtggtcgctccagatgagcagttcgcctatgcgctgctcggttggacgggcagcggcatgtttcgtcgcgatactcgtcgctacgcggaggaagagcgcattatgctgctcgacaaccatggtctctacgacctgaaaaagggcatctttctgagtgcggacagcgaagaagagattttcggtcatctggacctggattatctggagccgtgggaacgcaacgcg

SEQ ID NO: 6050 - protein, 394 aa, synthetic construct
  REGION 1..394: note = Variant of terminal deoxynucleotidyl transferase
MHHHHHHGGSGHPEGNTPEKEVPSVIARHVSPYACQRKTTLNNYNKKITDALEIMAENYKFKENLQARLEARRAASVLKSLPFEVTSMKDIQGLPCITDDVRPVIEEIIEVGESSRVKEILNDERYKAFKQFTSVFGVGVKTAEKWYRMGLRTLEEAKASKSLKLNKMQKAGFLYYEDLASGVSKEEADAVLDIVKETVRTVSPDALVTIAGGFRRGKPQGHDVDLLITIPGRPTDPELLHKVVDLLKKQGLLLYGDIRERTFVEGQLPNPKPDQLDNHQKCFAILKLYRPKVDNSAVGTSKKVDMAEVKDWKAVRVDLVVAPDEQFAYALLGWTGSGMFRRDTRRYAEEERIMLLDNHGLYDLKKGIFLSADSEEEIFGHLDLDYLEPWERNA

SEQ ID NO: 6051 - DNA, 1182 bp, synthetic construct
  misc_feature 1..1182: note = Variant of terminal deoxynucleotidyl transferase
  source 1..1182: mol_type = other DNA
atgcaccatcatcaccatcacgggggctccggccatccggaaggtaataccccggagaaggaggtgccgagcgttatcgcccgtcatgttagtccgtacgcgtgccagcgcaagaccacgctgaataactacaacaaaaagatcaccgacgcgctggaaatcatggccgagaactacaagtttaaagagaacctgcaggcgcgcctggaggcccgtcgcgccgcgagtgtcctgaaaagcctgccgttcgaggttaccagcatgaaagacatccaaggtctgccgtgcattaccgacgacgtacgtcctgtgatcgaagagatcatcgaagtaggcgagagcagccgtgttaaagaaatcctcaatgacgagcgctacaaggcctttaagcagttcaccagcgtgttcggtgtgggcgtcaagaccgcggaaaagtggtaccgtatgggcctccgtacgctggaagaagcaaaggccagtaagagtctgaagctgaacaagatgcagaaggcgggcttcctgtactacgaggatctggcgagcggtgttagtaaagaagaagccgatgccgttctggatatcgtgaaggaaacggtgcgcactgttagtccggatgcgctggtgaccatcgccggcggtttccgccgttttaaacctcagggccacgacgttgacctgctgatcacgattccgggccgtcctacggatccggagctgctccacaaagtggttgatctgctcaagaagcaaggtctgctgctgtacggggacatccgtgagcgtacgttcgtggaggggcaactgccaaatcctaaacctgaccagctggacaaccatcagaagtgcttcgccattctcaagctgtaccgtccgaaggtggataacagtgcggttgggacgtcgaagaaagtcgacatggctgaggttaaggattggaaagcggttcgtgtggatctggtggtcgctccagatgagcagttcgcctatgcgctgctcggttggacgggcagcggcatgtttcgtcgcgatactcgtcgctacgcggaggaagagcgcgacatgctgctcgacaaccatggtctctacgacctgaaaaagggcatctttctgagtgcggacagcgaagaagagattttcggtcatctggacctggattatctggagccgtgggaacgcaacgcg

SEQ ID NO: 6052 - protein, 394 aa, synthetic construct
  REGION 1..394: note = Variant of terminal deoxynucleotidyl transferase
MHHHHHHGGSGHPEGNTPEKEVPSVIARHVSPYACQRKTTLNNYNKKITDALEIMAENYKFKENLQARLEARRAASVLKSLPFEVTSMKDIQGLPCITDDVRPVIEEIIEVGESSRVKEILNDERYKAFKQFTSVFGVGVKTAEKWYRMGLRTLEEAKASKSLKLNKMQKAGFLYYEDLASGVSKEEADAVLDIVKETVRTVSPDALVTIAGGFRRFKPQGHDVDLLITIPGRPTDPELLHKVVDLLKKQGLLLYGDIRERTFVEGQLPNPKPDQLDNHQKCFAILKLYRPKVDNSAVGTSKKVDMAEVKDWKAVRVDLVVAPDEQFAYALLGWTGSGMFRRDTRRYAEEERDMLLDNHGLYDLKKGIFLSADSEEEIFGHLDLDYLEPWERNA

SEQ ID NO: 6053 - DNA, 1182 bp, synthetic construct
  misc_feature 1..1182: note = Variant of terminal deoxynucleotidyl transferase
  source 1..1182: mol_type = other DNA
atgcaccatcatcaccatcacgggggctccggccatccggaaggtaataccccggagaaggaggtgccgagcgttatcgcccgtcatgttagtccgtacgcgtgccagcgcaagaccacgctgaataactacaacaaaaagatcaccgacgcgctggaaatcatggccgagaactacaagtttaaagagaacctgcaggcgcgcctggaggcccgtcgcgccgcgagtgtcctgaaaagcctgccgttcgaggttaccagcatgaaagacatccaaggtctgccgtgcattaccgacgacgtacgtcctgtgatcgaagagatcatcgaagtaggcgagagcagccgtgttaaagaaatcctcaatgacgagcgctacaaggcctttaagcagttcaccagcgtgttcggtgtgggcgtcaagaccgcggaaaagtggtaccgtatgggcctccgtacgctggaagaagcaaaggccagtaagagtctgaagctgaacaagatgcagaaggcgggcttcctgtactacgaggatctggcgagcggtgttagtaaagaagaagccgatgccgttctggatatcgtgaaggaaacggtgcgcactgttagtccggatgcgctggtgaccatcgccggcggtttccgccgttctaaacctcagggccacgacgttgacctgctgatcacgattccgggccgtcctacggatccggagctgctccacaaagtggttgatctgctcaagaagcaaggtctgctgctgtacggggacatccgtgagcgtacgttcgtggaggggcaactgccaaatcctaaacctgaccagctggacaaccatcagaagtgcttcgccattctcaagctgtaccgtccgaaggtggataacagtgcggttgggacgtcgaagaaagtcgacatggctgaggttaaggattggaaagcggttcgtgtggatctggtggtcgctccagatgagcagttcgcctatgcgctgctcggttggacgggcagcggcatgtttcgtcgcgatactcgtcgctacgcggaggaagagcgcgacatgctgctcgacaaccatggtctctacgacctgaaaaagggcatctttctgagtgcggacagcgaagaagagattttcggtcatctggacctggattatctggagccgtgggaacgcaacgcg

SEQ ID NO: 6054 - protein, 394 aa, synthetic construct
  REGION 1..394: note = Variant of terminal deoxynucleotidyl transferase
MHHHHHHGGSGHPEGNTPEKEVPSVIARHVSPYACQRKTTLNNYNKKITDALEIMAENYKFKENLQARLEARRAASVLKSLPFEVTSMKDIQGLPCITDDVRPVIEEIIEVGESSRVKEILNDERYKAFKQFTSVFGVGVKTAEKWYRMGLRTLEEAKASKSLKLNKMQKAGFLYYEDLASGVSKEEADAVLDIVKETVRTVSPDALVTIAGGFRRSKPQGHDVDLLITIPGRPTDPELLHKVVDLLKKQGLLLYGDIRERTFVEGQLPNPKPDQLDNHQKCFAILKLYRPKVDNSAVGTSKKVDMAEVKDWKAVRVDLVVAPDEQFAYALLGWTGSGMFRRDTRRYAEEERDMLLDNHGLYDLKKGIFLSADSEEEIFGHLDLDYLEPWERNA

SEQ ID NO: 6055 - DNA, 1182 bp, synthetic construct
  misc_feature 1..1182: note = Variant of terminal deoxynucleotidyl transferase
  source 1..1182: mol_type = other DNA
atgcaccatcatcaccatcacgggggctccggccatccggaaggtaataccccggagaaggaggtgccgagcgttatcgcccgtcatgttagtccgtacgcgtgccagcgcaagaccacgctgaataactacaacaaaaagatcaccgacgcgctggaaatcatggccgagaactacaagtttaaagagaacctgcaggcgcgcctggaggcccgtcgcgccgcgagtgtcctgaaaagcctgccgttcgaggttaccagcatgaaagacatccaaggtctgccgtgcattaccgacgacgtacgtcctgtgatcgaagagatcatcgaagtaggcgggagcagccgtgttaaagaaatcctcaatgacgagcgctacaaggcctttaagcagttcaccagcgtgttcggtgtgggcgtcaagaccgcggaaaagtggtaccgtatgggcctccgtacgctggaagaagcaaaggccagtaagagtctgaagctgaacaagatgcagaaggcgggcttcctgtactacgaggatctggcgagcggtgttagtaaagaagaagccgatgccgttctggatatcgtgaaggaaacggtgcgcactgttagtccggatgcgctggtgaccatcgccggcggtttccgccgtggcaaacctcagggccacgacgttgacctgctgatcacgattccgggccgtcctacggatccggagctgctccacaaagtggttgatctgctcaagaagcaaggtctgctgctgtacggggacatccgtgagcgtacgttcgtggaggggcaactgccaaatcctaaacctgaccagctggacaaccatcagaagtgcttcgccattctcaagctgtaccgtccgaaggtggataacagtgcggttgggacgtcgaagaaagtcgacatggctgaggttaaggattggaaagcggttcgtgtggatctggtggtcgctccagatgagcagttcgcctatgcgctgctcggttggacgggcagcggcatgtttcgtcgcgatactcgtcgctacgcggaggaagagcgcgacatgtctctcgacaaccatggtctctacgacctgaaaaagggcatctttctgagtgcggacagcgaagaagagattttcggtcatctggacctggattatctggagccgtgggaacgcaacgcg

SEQ ID NO: 6056 - protein, 394 aa, synthetic construct
  REGION 1..394: note = Variant of terminal deoxynucleotidyl transferase
MHHHHHHGGSGHPEGNTPEKEVPSVIARHVSPYACQRKTTLNNYNKKITDALEIMAENYKFKENLQARLEARRAASVLKSLPFEVTSMKDIQGLPCITDDVRPVIEEIIEVGGSSRVKEILNDERYKAFKQFTSVFGVGVKTAEKWYRMGLRTLEEAKASKSLKLNKMQKAGFLYYEDLASGVSKEEADAVLDIVKETVRTVSPDALVTIAGGFRRGKPQGHDVDLLITIPGRPTDPELLHKVVDLLKKQGLLLYGDIRERTFVEGQLPNPKPDQLDNHQKCFAILKLYRPKVDNSAVGTSKKVDMAEVKDWKAVRVDLVVAPDEQFAYALLGWTGSGMFRRDTRRYAEEERDMSLDNHGLYDLKKGIFLSADSEEEIFGHLDLDYLEPWERNA

SEQ ID NO: 6057 - DNA, 1182 bp, synthetic construct
  misc_feature 1..1182: note = Variant of terminal deoxynucleotidyl transferase
  source 1..1182: mol_type = other DNA
atgcaccatcatcaccatcacgggggctccggccatccggaaggtaataccccggagaaggaggtgccgagcgttatcgcccgtcatgttagtccgtacgcgtgccagcgcaagaccacgctgaataactacaacaaaaagatcaccgacgcgctggaaatcatggccgagaactacaagtttaaagagaacctgcaggcgcgcctggaggcccgtcgcgccgcgagtgtcctgaaaagcctgccgttcgaggttaccagcatgaaagacatccaaggtctgccgtgcattaccgacgacgtacgtcctgtgatcgaagagatcatcgaagtaggcgagagcagccgtgttaaagaaatcctcaatgacgagcgctacaaggcctttaagcagttcaccagcgtgttcggtgtgggcgtcaagaccgcggaaaagtggtaccgtatgggcctccgtacgctggaagaagcaaaggccagtaagagtctgaagctgaacaagatgcagaaggcgggcttcctgtactacgaggatctggcgagcggtgttagtaaagaagaagccgatgccgttctggatatcgtgaaggaaacggtgcgcactgttagtccggatgcgctggtgaccatcgccggcggtttccgccgtggcaaacctcagggccacgacgttgacctgctgatcacgattccgggccgtcctacggatccggagctgctccacaaagtggttgatctgctcaagaagcaaggtctgctgctgtacggggacatccgtgagcgtacgttcgtggaggggcaactgccaaatcctaaacctgaccagctggacaaccatcagaagtgcttcgccattctcaagctgtaccgtccgaaggtggataacagtgcggttgggacgtcgaagaaagtcgacatggctgaggttaaggattggaaagcggttcgtgtggatctggtggtcgctccagatgagcagttcgtgtatgcgctgctcggttggacgggcagcggcatgtttcgtcgcgatactcgtcgctacgcggaggaagagcgcgacatgctgctcgacaaccatggtctctacgacctgaaaaagggcatctttctgagtgcggacagcgaagaagagattttcggtcatctggacctggattatctggagccgtgggaacgcaacgcg

SEQ ID NO: 6058 - protein, 394 aa, synthetic construct
  REGION 1..394: note = Variant of terminal deoxynucleotidyl transferase
MHHHHHHGGSGHPEGNTPEKEVPSVIARHVSPYACQRKTTLNNYNKKITDALEIMAENYKFKENLQARLEARRAASVLKSLPFEVTSMKDIQGLPCITDDVRPVIEEIIEVGESSRVKEILNDERYKAFKQFTSVFGVGVKTAEKWYRMGLRTLEEAKASKSLKLNKMQKAGFLYYEDLASGVSKEEADAVLDIVKETVRTVSPDALVTIAGGFRRGKPQGHDVDLLITIPGRPTDPELLHKVVDLLKKQGLLLYGDIRERTFVEGQLPNPKPDQLDNHQKCFAILKLYRPKVDNSAVGTSKKVDMAEVKDWKAVRVDLVVAPDEQFVYALLGWTGSGMFRRDTRRYAEEERDMLLDNHGLYDLKKGIFLSADSEEEIFGHLDLDYLEPWERNA

SEQ ID NO: 6059 - DNA, 1182 bp, synthetic construct
  misc_feature 1..1182: note = Variant of terminal deoxynucleotidyl transferase
  source 1..1182: mol_type = other DNA
atgcaccatcatcaccatcacgggggctccggccatccggaaggtaataccccggagaaggaggtgccgagcgttatcgcccgtcatgttagtccgtacgcgtgccagcgcaagaccacgctgaataactacaacaaaaagatcaccgacgcgctggaaatcatggccgagaactacaagtttaaagagaacctgcaggcgcgcctggaggcccgtcgcgccgcgagtgtcctgaaaagcctgccgttcgaggttaccagcatgaaagacatccaaggtctgccgtgcattaccgacgacgtacgtcctgtgatcgaagagatcatcgaagtaggcgagagcagccgtgttaaagaaatcctcaatgacgagcgctacaaggcctttaagcagttcaccagcgtgttcggtgtgggcgtcaagaccgcggaaaagtggtaccgtatgggcctccgtacgctggaagaagcaaaggccagtaagagtctgaagctgaacaagatgcagaaggcgggcttcctgtactacgaggatctggcgagcggtgttagtaaagaagaagccgatgccgttctggatatcgtgaaggaaacggtgcgcactgttagtccggatgcgctggtgaccatcgccggcggtttccgccgtggcaaacctcagggccacgacgttgacctgctgatcacgattccgggccgtcctacggatccggagctgctccacaaagtggttgatctgctcaagaagcaaggtctgctgctgtacggggacatccgtgagcgtacgttcgtggaggggcaactgccaaatcctaaacctgaccagctggacaaccatcagaagtgcttcgccattctcaagctgtaccgtccgaaggtggataacagtgcggttgggacgtcgaagaaagtcgacatggctgaggttaaggattggaaagcggttcgtgtggatctggtggtcgctccagatgagcagttcgcctatgcgctgctcggttggacgggcagcggcatgtttcgtcgcgatactcgtcgctacgcggaggaagagcgcgacatgctgctcgacaaccatggtctctacgacctgaaaaagggcatctttatgagtgcggacagcgaagaagagattttcggtcatctggacctggattatctggagccgtgggaacgcaacgcg

SEQ ID NO: 6060 - protein, 394 aa, synthetic construct
  REGION 1..394: note = Variant of terminal deoxynucleotidyl transferase
MHHHHHHGGSGHPEGNTPEKEVPSVIARHVSPYACQRKTTLNNYNKKITDALEIMAENYKFKENLQARLEARRAASVLKSLPFEVTSMKDIQGLPCITDDVRPVIEEIIEVGESSRVKEILNDERYKAFKQFTSVFGVGVKTAEKWYRMGLRTLEEAKASKSLKLNKMQKAGFLYYEDLASGVSKEEADAVLDIVKETVRTVSPDALVTIAGGFRRGKPQGHDVDLLITIPGRPTDPELLHKVVDLLKKQGLLLYGDIRERTFVEGQLPNPKPDQLDNHQKCFAILKLYRPKVDNSAVGTSKKVDMAEVKDWKAVRVDLVVAPDEQFAYALLGWTGSGMFRRDTRRYAEEERDMLLDNHGLYDLKKGIFMSADSEEEIFGHLDLDYLEPWERNA

SEQ ID NO: 6061 - DNA, 1182 bp, synthetic construct
  misc_feature 1..1182: note = Variant of terminal deoxynucleotidyl transferase
  source 1..1182: mol_type = other DNA
atgcaccatcatcaccatcacgggggctccggccatccggaaggtaataccccggagaaggaggtgccgagcgttatcgcccgtcatgttagtccgtacgcgtgccagcgcaagaccacgctgaataactacaacaaaaagatcaccgacgcgctggaaatcatggccgagaactacaagtttaaagagaacctgcaggcgcgcctggaggcccgtcgcgccgcgagtgtcctgaaaagcctgccgttcgaggttaccagcatgaaagacatccaaggtctgccgtgcattaccgacgacgtacgtcctgtgatcgaagagatcatcgaagtaggcgagagcagccgtgttaaagaaatcctcaatgacgagcgctacaaggcctttaagcagttcaccagcgtgttcggtgtgggcgtcaagaccgcggaaaagtggtaccgtatgggcctccgtacgctggaagaagcaaaggccagtaagagtctgaagctgaacaagatgcagaaggcgggcttcctgtactacgaggatctggcgagcggtgttagtaaagaagaagccgatgccgttctggatatcgtgaaggaaacggtgcgcactgttagtccggatgcgctggtgaccatcgccggcggtttccgccgtggcaaacctcagggccacgacgttgacctgctgatcacgattccgggccgtcctacggatccggagctgctccacaaagtggttgatctgctcaagaagcaaggtctgctgctgtacggggacatccgtgagcgtacgttcgtggaggggcaactgccaaatcctaaacctgaccagctggacaaccatcagaagtgcttcgccattctcaagctgtaccgtccgaaggtggataacagtgcggttgggacgtcgaagaaagtcgacatggctgaggttaaggattggaaagcggttcgtgtggatctggtggtcgctccagatccgcagttcgcctatgcgctgctcggttggacgggcagcggcatgtttcgtcgcgatactcgtcgctacgcggaggaagagcgcgacatgctgctcgacaaccatggtctctacgacctgaaaaagggcatctttctgagtgcggacagcgaagaagagattttcggtcatctggacctggattatctggagccgtgggaacgcaacgcg

SEQ ID NO: 6062 - protein, 394 aa, synthetic construct
  REGION 1..394: note = Variant of terminal deoxynucleotidyl transferase
MHHHHHHGGSGHPEGNTPEKEVPSVIARHVSPYACQRKTTLNNYNKKITDALEIMAENYKFKENLQARLEARRAASVLKSLPFEVTSMKDIQGLPCITDDVRPVIEEIIEVGESSRVKEILNDERYKAFKQFTSVFGVGVKTAEKWYRMGLRTLEEAKASKSLKLNKMQKAGFLYYEDLASGVSKEEADAVLDIVKETVRTVSPDALVTIAGGFRRGKPQGHDVDLLITIPGRPTDPELLHKVVDLLKKQGLLLYGDIRERTFVEGQLPNPKPDQLDNHQKCFAILKLYRPKVDNSAVGTSKKVDMAEVKDWKAVRVDLVVAPDPQFAYALLGWTGSGMFRRDTRRYAEEERDMLLDNHGLYDLKKGIFLSADSEEEIFGHLDLDYLEPWERNA

SEQ ID NO: 6063 - DNA, 1182 bp, synthetic construct
  misc_feature 1..1182: note = Variant of terminal deoxynucleotidyl transferase
  source 1..1182: mol_type = other DNA
atgcaccatcatcaccatcacgggggctccggccatccggaaggtaataccccggagaaggaggtgccgagcgttatcgcccgtcatgttagtccgtacgcgtgccagcgcaagaccacgctgaataactacaacaaaaagatcaccgacgcgctggaaatcatggccgagaactacaagtttaaagagaacctgcaggcgcgcctggaggcccgtcgcgccgcgagtgtcctgaaaagcctgccgttcgaggttaccagcatgaaagacatccaaggtctgccgtgcattaccgacgacgtacgtcctgtgatcgaagagatcatcgaagtaggcgagagcagccgtgttaaagaaatcctcaatgacgagcgctacaaggcctttaagcagttcaccagcgtgttcggtgtgggcgtcaagaccgcggaaaagtggtaccgtatgggcctccgtacgctggaagaagcaaaggccagtaagagtctgaagctgaacaagatgcagaaggcgggcttcctgtactacgaggatctggcgagcggtgttagtaaagaagaagccgatgccgttctggatatcgtgaaggaaacggtgcgcactgttagtccggatgcgctggtgaccatcgccggcggtttccgccgtggcaaacctcagggccacgacgttgacctgctgatcacgattccgggccgtcctacggatccggagctgctccacaaagtggttgatctgctcaagaagcaaggtctgctgctgtacggggacatccgtgagcgtacgttcgtggaggggcaactgccaaatcctaaacctgaccagctggacaaccatcagaagtgcttcgccattctcaagctgtaccgtccgaaggtggataacagtgcggttgggacgtcgaagaaagtcgacatggctgaggttaaggattggaaagcggttcgtgtggatctggtggtcgctccagatgagcagttcgcctatgcgctgacgggttggacgggcagcggcatgtttcgtcgcgatactcgtcgctacgcggaggaagagcgcgacatgctgctcgacaaccatggtctctacgacctgaaaaagggcatctttctgagtgcggacagcgaagaagagattttcggtcatctggacctggattatctggagccgtgggaacgcaacgcg

SEQ ID NO: 6064 - protein, 394 aa, synthetic construct
  REGION 1..394: note = Variant of terminal deoxynucleotidyl transferase
MHHHHHHGGSGHPEGNTPEKEVPSVIARHVSPYACQRKTTLNNYNKKITDALEIMAENYKFKENLQARLEARRAASVLKSLPFEVTSMKDIQGLPCITDDVRPVIEEIIEVGESSRVKEILNDERYKAFKQFTSVFGVGVKTAEKWYRMGLRTLEEAKASKSLKLNKMQKAGFLYYEDLASGVSKEEADAVLDIVKETVRTVSPDALVTIAGGFRRGKPQGHDVDLLITIPGRPTDPELLHKVVDLLKKQGLLLYGDIRERTFVEGQLPNPKPDQLDNHQKCFAILKLYRPKVDNSAVGTSKKVDMAEVKDWKAVRVDLVVAPDEQFAYALTGWTGSGMFRRDTRRYAEEERDMLLDNHGLYDLKKGIFLSADSEEEIFGHLDLDYLEPWERNA

SEQ ID NO: 6065 - DNA, 1182 bp, synthetic construct
  misc_feature 1..1182: note = Variant of terminal deoxynucleotidyl transferase
  source 1..1182: mol_type = other DNA
atgcaccatcatcaccatcacgggggctccggccatccggaaggtaataccccggagaaggaggtgccgagcgttatcgcccgtcatgttagtccgtacgcgtgccagcgcaagaccacgctgaataactacaacaaaaagatcaccgacgcgctggaaatcatggccgagaactacaagtttaaagagaacctgcaggcgcgcctggaggcccgtcgcgccgcgagtgtcctgaaaagcctgccgttcgaggttaccagcatgaaagacatccaaggtctgccgtgcattaccgacgacgtacgtcctgtgatcgaagagatcatcgaagtaggcgagagcagccgtgttaaagaaatcctcaatgacgagcgctacaaggcctttaagcagttcaccagcgtgttcggtgtgggcgtcaagaccgcggaaaagtggtaccgtatgggcctccgtacgctggaagaagcaaaggccagtaagagtctgaagctgaacaagatgcagaaggcgggcttcctgtactacgaggatctggcgagcggtgttagtaaagaagaagccgatgccgttctggatatcgtgaaggaaacggtgcgcactgttagtccggatgcgctggtgaccatcgccggcggtttccgccgtggcaaacctcagggccacgacgttgacctgctgatcacgattccgggccgtcctacggatccggagctgctccacaaagtggttgatctgctcaagaagcaaggtctgctgctgtacggggacatccgtgagcgtacgttcgtggaggggcaactgccaaatcctaaacctgaccagctggacaaccatcagaagtgcttcgccattctcaagctgtaccgtccgaaggtggataacagtgcggttgggacgtcgaagaaagtcgacatggctgaggttaaggattggaaagcggttcgtgtggatctggtggtcgctccagatgagcagttcgcctatgcgctgctcggttggacgggcagcggcatgtttcgtcgcgatactcgtcgctacgcggaggaagagcgcgacatgctggttgacaaccatggtctctacgacctgaaaaagggcatctttctgagtgcggacagcgaagaagagattttcggtcatctggacctggattatctggagccgtgggaacgcaacgcg

SEQ ID NO: 6066 - protein, 394 aa, synthetic construct
  REGION 1..394: note = Variant of terminal deoxynucleotidyl transferase
MHHHHHHGGSGHPEGNTPEKEVPSVIARHVSPYACQRKTTLNNYNKKITDALEIMAENYKFKENLQARLEARRAASVLKSLPFEVTSMKDIQGLPCITDDVRPVIEEIIEVGESSRVKEILNDERYKAFKQFTSVFGVGVKTAEKWYRMGLRTLEEAKASKSLKLNKMQKAGFLYYEDLASGVSKEEADAVLDIVKETVRTVSPDALVTIAGGFRRGKPQGHDVDLLITIPGRPTDPELLHKVVDLLKKQGLLLYGDIRERTFVEGQLPNPKPDQLDNHQKCFAILKLYRPKVDNSAVGTSKKVDMAEVKDWKAVRVDLVVAPDEQFAYALLGWTGSGMFRRDTRRYAEEERDMLVDNHGLYDLKKGIFLSADSEEEIFGHLDLDYLEPWERNA

SEQ ID NO: 6067 - DNA, 1182 bp, synthetic construct
  misc_feature 1..1182: note = Variant of terminal deoxynucleotidyl transferase
  source 1..1182: mol_type = other DNA
atgcaccatcatcaccatcacgggggctccggccatccggaaggtaataccccggagaaggaggtgccgagcgttatcgcccgtcatgttagtccgtacgcgtgccagcgcaagaccacgctgaataactacaacaaaaagatcaccgacgcgctggaaatcatggccgagaactacaagtttaaagagaacctgcaggcgcgcctggaggcccgtcgcgccgcgagtgtcctgaaaagcctgccgttcgaggttaccagcatgaaagacatccaaggtctgccgtgcattaccgacgacgtacgtcctgtgatcgaagagatcatcgaagtaggcgagagcagccgtgttaaagaaatcctcaatgacgagcgctacaaggcctttaagcagttcaccagcgtgttcggtgtgggcgtcaagaccgcggaaaagtggtaccgtatgggcctccgtacgctggaagaagcaaaggccagtaagagtctgaagctgaacaagatgcagaaggcgggcttcctgtactacgaggatctggcgagcggtgttagtaaagaagaagccgatgccgttctggatatcgtgaaggaaacggtgcgcactgttagtccggatgcgctggtgaccatcgccggcggtttccgccgtggcaaacctcagggccacgacgttgacctgctgatcacgattccgggccgtcctacggatccggagctgctccacaaagtggttgatctgctcaagaagcaaggtctgctgctgtacggggacatccgtgagcgtacgttcgtggaggggcaactgccaaatcctaaacctgaccagctggacaaccatcagaagtgcttcgccattctcaagctgtaccgtccgaaggtggataacagtgcggttgggacgtcgaagaaagtcgacatggctgaggttaaggattggaaagcggttcgtgtggatctggtggtcgctccagatgagcagttcgcctatgcgctgctcggttggacgggcagcggcatgtttcgtcgcgatactcgtcgctacgcggaggaagagcgcgacatgctgctcgacaaccatggtctctacgacctgaaaaagggcatctttctgagtgcggacagcgaagaagagattttcggtcatctgattctggattatctggagccgtgggaacgcaacgcg

SEQ ID NO: 6068 - protein, 394 aa, synthetic construct
  REGION 1..394: note = Variant of terminal deoxynucleotidyl transferase
MHHHHHHGGSGHPEGNTPEKEVPSVIARHVSPYACQRKTTLNNYNKKITDALEIMAENYKFKENLQARLEARRAASVLKSLPFEVTSMKDIQGLPCITDDVRPVIEEIIEVGESSRVKEILNDERYKAFKQFTSVFGVGVKTAEKWYRMGLRTLEEAKASKSLKLNKMQKAGFLYYEDLASGVSKEEADAVLDIVKETVRTVSPDALVTIAGGFRRGKPQGHDVDLLITIPGRPTDPELLHKVVDLLKKQGLLLYGDIRERTFVEGQLPNPKPDQLDNHQKCFAILKLYRPKVDNSAVGTSKKVDMAEVKDWKAVRVDLVVAPDEQFAYALLGWTGSGMFRRDTRRYAEEERDMLLDNHGLYDLKKGIFLSADSEEEIFGHLILDYLEPWERNA

SEQ ID NO: 6069 - DNA, 1182 bp, synthetic construct
  misc_feature 1..1182: note = Variant of terminal deoxynucleotidyl transferase
  source 1..1182: mol_type = other DNA
atgcaccatcatcaccatcacgggggctccggccatccggaaggtaataccccggagaaggaggtgccgagcgttatcgcccgtcatgttagtccgtacgcgtgccagcgcaagaccacgctgaataactacaacaaaaagatcaccgacgcgctggaaatcatggccgagaactacaagtttaaagagaacctgcaggcgcgcctggaggcccgtcgcgccgcgagtgtcctgaaaagcctgccgttcgaggttaccagcatgaaagacatccaaggtctgccgtgcattaccgacgacgtacgtcctgtgatcgaagagatcatcgaagtaggcgagagcagccgtgttaaagaaatcctcaatgacgagcgctacaaggcctttaagcagttcaccagcgtgttcggtgtgggcgtcaagaccgcggaaaagtggtaccgtatgggcctccgtacgctggaagaagcaaaggccagtaagagtctgaagctgaacaagatgcagaaggcgggcttcctgtactacgaggatctggcgagcggtgttagtaaagaagaagccgatgccgttctggatatcgtgaaggaaacggtgcgcactgttagtccggatgcgctggtgaccatcgccggcggtttccgccgtggcaaacctcagggccacgacgttgacctgctgatcacgattccgggccgtcctacggatccggagtatctccacaaagtggttgatctgctcaagaagcaaggtctgctgctgtacggggacatccgtgagcgtacgttcgtggaggggcaactgccaaatcctaaacctgaccagctggacaaccatcagaagtgcttcgccattctcaagctgtaccgtccgaaggtggataacagtgcggttgggacgtcgaagaaagtcgacatggctgaggttaaggattggaaagcggttcgtgtggatctggtggtcgctccagatgagcagttcgcctatgcgctgctcggttggacgggcagcggcatgtttcgtcgcgatactcgtcgctacgcggaggaagagcgcgacatgctgctcgacaaccatggtctctacgacctgaaaaagggcatctttctgagtgcggacagcgaagaagagattttcggtcatctggacctggattatctggagccgtgggaacgcaacgcg

SEQ ID NO: 6070 - protein, 394 aa, synthetic construct
  REGION 1..394: note = Variant of terminal deoxynucleotidyl transferase
MHHHHHHGGSGHPEGNTPEKEVPSVIARHVSPYACQRKTTLNNYNKKITDALEIMAENYKFKENLQARLEARRAASVLKSLPFEVTSMKDIQGLPCITDDVRPVIEEIIEVGESSRVKEILNDERYKAFKQFTSVFGVGVKTAEKWYRMGLRTLEEAKASKSLKLNKMQKAGFLYYEDLASGVSKEEADAVLDIVKETVRTVSPDALVTIAGGFRRGKPQGHDVDLLITIPGRPTDPEYLHKVVDLLKKQGLLLYGDIRERTFVEGQLPNPKPDQLDNHQKCFAILKLYRPKVDNSAVGTSKKVDMAEVKDWKAVRVDLVVAPDEQFAYALLGWTGSGMFRRDTRRYAEEERDMLLDNHGLYDLKKGIFLSADSEEEIFGHLDLDYLEPWERNA

SEQ ID NO: 6071 - DNA, 1182 bp, synthetic construct
  misc_feature 1..1182: note = Variant of terminal deoxynucleotidyl transferase
  source 1..1182: mol_type = other DNA
atgcaccatcatcaccatcacgggggctccggccatccggaaggtaataccccggagaaggaggtgccgagcgttatcgcccgtcatgttagtccgtacgcgtgccagcgcaagaccacgctgaataactacaacaaaaagatcaccgacgcgctggaaatcatggccgagaactacaagtttaaagagaacctgcaggcgcgcctggaggcccgtcgcgccgcgagtgtcctgaaaagcctgccgttcgaggttaccagcatgaaagacatccaaggtctgccgtgcattaccgacgacgtacgtcctgtgatcgaagagatcatcgaagtaggcgagagcagccgtgttaaagaaatcctcaatgacgagcgctacaaggcctttaagcagttcaccagcgtgttcggtgtgggcgtcaagaccgcggaaaagtggtaccgtatgggcctccgtacgctggaagaagcaaaggccagtaagagtctgaagctgaacaagatgcagaaggcgggcttcctgtactacgaggatctggcgagcggtgttagtaaagaagaagccgatgccgttctggatatcgtgaaggaaacggtgcgcactgttagtccggatgcgctggtgaccatcgccggcggtttccgccgtggcaaacctcagggccacgacgttgacctgctgatcacgattccgggccgtcctacggatccggagctgctccacaaagtggttgatctgctcaagaagcaaggtctgctgctgtacggggacatccgtgagcgtacgttcgtggaggggcaactgccaaatcctaaacctgaccagctggacaaccatcagaagtgcttcgccattctcaagctgtaccgtccgaaggtggataacagtgcggttgggacgtcgaagaaagtcgacatggctgaggttaaggattggaaagcggttcgtgtggatctggtggtcgctccagatgagcagttcgcctatgcgctgctcggttggacgggcagcggcatgtttcgtcgcgatactcgtcgctacgcggaggaagagcgcgacatgctgctcgacaaccatggtctctgggacctgaaaaagggcatctttctgagtgcggacagcgaagaagagattttcggtcatctggacctggattatctggagccgtgggaacgcaacgcg

SEQ ID NO: 6072 - protein, 394 aa, synthetic construct
  REGION 1..394: note = Variant of terminal deoxynucleotidyl transferase
MHHHHHHGGSGHPEGNTPEKEVPSVIARHVSPYACQRKTTLNNYNKKITDALEIMAENYKFKENLQARLEARRAASVLKSLPFEVTSMKDIQGLPCITDDVRPVIEEIIEVGESSRVKEILNDERYKAFKQFTSVFGVGVKTAEKWYRMGLRTLEEAKASKSLKLNKMQKAGFLYYEDLASGVSKEEADAVLDIVKETVRTVSPDALVTIAGGFRRGKPQGHDVDLLITIPGRPTDPELLHKVVDLLKKQGLLLYGDIRERTFVEGQLPNPKPDQLDNHQKCFAILKLYRPKVDNSAVGTSKKVDMAEVKDWKAVRVDLVVAPDEQFAYALLGWTGSGMFRRDTRRYAEEERDMLLDNHGLWDLKKGIFLSADSEEEIFGHLDLDYLEPWERNA

SEQ ID NO: 6073 - DNA, 1182 bp, synthetic construct
  misc_feature 1..1182: note = Variant of terminal deoxynucleotidyl transferase
  source 1..1182: mol_type = other DNA
atgcaccatcatcaccatcacgggggctccggccatccggaaggtaataccccggagaaggaggtgccgagcgttatcgcccgtcatgttagtccgtacgcgtgccagcgcaagaccacgctgaataactacaacaaaaagatcaccgacgcgctggaaatcatggccgagaactacaagtttaaagagaacctgcaggcgcgcctggaggcccgtcgcgccgcgagtgtcctgaaaagcctgccgttcgaggttaccagcatgaaagacatccaaggtctgccgtgcattaccgacgacgtacgtcctgtgatcgaagagatcatcgaagtaggcgagagcagccgtgttaaagaaatcctcaatgacgagcgctacaaggcctttaagcagttcaccagcgtgttcggtgtgggcgtcaagaccgcggaaaagtggtaccgtatgggcctccgtacgctggaagaagcaaaggccagtaagagtctgaagctgaacaagatgcagaaggcgggcttcctgtactacgaggatctggcgagcggtgttagtaaagaagaagccgatgccgttctggatatcgtgaaggaaacggtgcgcactgttagtccggatgcgctggtgaccatcgccggcggtttccgccgtggcaaacctcagggccacgacgttgacctgctgatcacgattccgggccgtcctacggatccggagctgctccacaaagtggttgatctgctcaagaagcaaggtctgctgctgtacggggacatccgtgagcgtacgttcgtggaggggcaactgccaaatcctaaacctgaccagctggacaaccatcagaagtgcttcgccattctcaagctgtaccgtccgaaggtggataacagtgcggttgggacgtcgaagaaagtcgacatggctgaggttaaggattggaaagcggttcgtgtggatctggtggtcgctccagatgagcagttcgcctatgcgctgctcggttggacgggcagcggcatgtttcgtcgcgatactcgtcgctacgcggaggaagagcgcaggatgctgctcgacaaccatggtctctacgacctgaaaaagggcatctttctgagtgcggacagcgaagaagagattttcggtcatctggacctggattatctggagccgtgggaacgcaacgcg

SEQ ID NO: 6074 - protein, 394 aa, synthetic construct
  REGION 1..394: note = Variant of terminal deoxynucleotidyl transferase
MHHHHHHGGSGHPEGNTPEKEVPSVIARHVSPYACQRKTTLNNYNKKITDALEIMAENYKFKENLQARLEARRAASVLKSLPFEVTSMKDIQGLPCITDDVRPVIEEIIEVGESSRVKEILNDERYKAFKQFTSVFGVGVKTAEKWYRMGLRTLEEAKASKSLKLNKMQKAGFLYYEDLASGVSKEEADAVLDIVKETVRTVSPDALVTIAGGFRRGKPQGHDVDLLITIPGRPTDPELLHKVVDLLKKQGLLLYGDIRERTFVEGQLPNPKPDQLDNHQKCFAILKLYRPKVDNSAVGTSKKVDMAEVKDWKAVRVDLVVAPDEQFAYALLGWTGSGMFRRDTRRYAEEERRMLLDNHGLYDLKKGIFLSADSEEEIFGHLDLDYLEPWERNA

SEQ ID NO: 6075 - DNA, 1182 bp, synthetic construct
  misc_feature 1..1182: note = Variant of terminal deoxynucleotidyl transferase
  source 1..1182: mol_type = other DNA
atgcaccatcatcaccatcacgggggctccggccatccggaaggtaataccccggagaaggaggtgccgagcgttatcgcccgtcatgttagtccgtacgcgtgccagcgcaagaccacgctgaataactacaacaaaaagatcaccgacgcgctggaaatcatggccgagaactacaagtttaaagagaacctgcaggcgcgcctggaggcccgtcgcgccgcgagtgtcctgaaaagcctgccgttcgaggttaccagcatgaaagacatccaaggtctgccgtgcattaccgacgacgtacgtcctgtgatcgaagagatcatcgaagtaggcgagagcagccgtgttaaagaaatcctcaatgacgagcgctacaaggcctttaagcagttcaccagcgtgttcggtgtgggcgtcaagaccgcggaaaagtggtaccgtatgggcctccgtacgctggaagaagcaaaggccagtaagagtctgaagctgaacaagatgcagaaggcgggcttcctgtactacgaggatctggcgagcggtgttagtaaagaagaagccgatgccgttctggatatcgtgaaggaaacggtgcgcactgttagtccggatgcgctggtgaccatcgccggcggtttccgccgtggcaaacctcagggccacgacgttgacctgctgatcacgattccgggccgtcctacggatccggagctgctccacaaagtggttgatctgctcaagaagcaaggtctgctgctgtacggggacatccgtgagcgtacgttcgtggaggggcaactgccaaatcctaaacctgaccagctggacaaccatcagaagtgcttcgccattctcaagctgtaccgtccgaaggtggataacagtgcggttgggacgtcgaagaaagtcgacatggctgaggttaaggattggggggcggttcgtgtggatctggtggtcgctccagatgagcagttcgcctatgcgctgctcggttggacgggcagcggcatgtttcgtcgcgatactcgtcgctacgcggaggaagagcgcgacatgctgctcgacaaccatggtctctacgacctgaaaaagggcatctttctgagtgcggacagcgaagaagagattttcggtcatctggacctggattatctggagccgtgggaacgcaacgcg

SEQ ID NO: 6076 - protein, 394 aa, synthetic construct
  REGION 1..394: note = Variant of terminal deoxynucleotidyl transferase
MHHHHHHGGSGHPEGNTPEKEVPSVIARHVSPYACQRKTTLNNYNKKITDALEIMAENYKFKENLQARLEARRAASVLKSLPFEVTSMKDIQGLPCITDDVRPVIEEIIEVGESSRVKEILNDERYKAFKQFTSVFGVGVKTAEKWYRMGLRTLEEAKASKSLKLNKMQKAGFLYYEDLASGVSKEEADAVLDIVKETVRTVSPDALVTIAGGFRRGKPQGHDVDLLITIPGRPTDPELLHKVVDLLKKQGLLLYGDIRERTFVEGQLPNPKPDQLDNHQKCFAILKLYRPKVDNSAVGTSKKVDMAEVKDWGAVRVDLVVAPDEQFAYALLGWTGSGMFRRDTRRYAEEERDMLLDNHGLYDLKKGIFLSADSEEEIFGHLDLDYLEPWERNA

SEQ ID NO: 6077 - DNA, 1182 bp, synthetic construct
  misc_feature 1..1182: note = Variant of terminal deoxynucleotidyl transferase
  source 1..1182: mol_type = other DNA
atgcaccatcatcaccatcacgggggctccggccatccggaaggtaataccccggagaaggaggtgccgagcgttatcgcccgtcatgttagtccgtacgcgtgccagcgcaagaccacgctgaataactacaacaaaaagatcaccgacgcgctggaaatcatggccgagaactacaagtttaaagagaacctgcaggcgcgcctggaggcccgtcgcgccgcgagtgtcctgaaaagcctgccgttcgaggttaccagcatgaaagacatccaaggtctgccgtgcattaccgacgacgtacgtcctgtgatcgaagagatcatcgaagtaggcgagagcagccgtgttaaagaaatcctcaatgacgagcgctacaaggcctttaagcagttcaccagcgtgttcggtgtgggcgtcaagaccgcggaaaagtggtaccgtatgggcctccgtacgctggaagaagcaaaggccagtaagagtctgaagctgaacaagatgcagaaggcgggcttcctgtactacgaggatctggcgagcggtgttagtaaagaagaagccgatgccgttctggatatcgtgaaggaaacggtgcgcactgttagtccggatgcgctggtgaccatcgccggcggtttccgccgtggcaaacctcagggccacgacgttgacctgctgatcacgattccgggccgtcctacggatccggagctgctccacaaagtggttgatctgctcaagaagcaaggtctgctgctgtacggggacatccgtgagcgtacgttcgtggaggggcaactgccaaatcctaaacctgaccagctggacaaccatcagaagtgcttcgccattctcaagctgtaccgtccgaaggtggataacagtgcggttgggacgtcgaagaaagtcgacatggctgaggttaaggattggaaagcggttcgtgtggatctggtggtcgctccagatgagcagttcgcctatgcgctgctcggttggacgggcagcggcatgtttcgtcgcgatactcgtcgctacgcggaggaagagcgcgacatgctgctcgacaaccatggtctctacgacctgaaaaagggcatctttcgtagtgcggacagcgaagaagagattttcggtcatctggacctggattatctggagccgtgggaacgcaacgcg

SEQ ID NO: 6078 - protein, 394 aa, synthetic construct
  REGION 1..394: note = Variant of terminal deoxynucleotidyl transferase
MHHHHHHGGSGHPEGNTPEKEVPSVIARHVSPYACQRKTTLNNYNKKITDALEIMAENYKFKENLQARLEARRAASVLKSLPFEVTSMKDIQGLPCITDDVRPVIEEIIEVGESSRVKEILNDERYKAFKQFTSVFGVGVKTAEKWYRMGLRTLEEAKASKSLKLNKMQKAGFLYYEDLASGVSKEEADAVLDIVKETVRTVSPDALVTIAGGFRRGKPQGHDVDLLITIPGRPTDPELLHKVVDLLKKQGLLLYGDIRERTFVEGQLPNPKPDQLDNHQKCFAILKLYRPKVDNSAVGTSKKVDMAEVKDWKAVRVDLVVAPDEQFAYALLGWTGSGMFRRDTRRYAEEERDMLLDNHGLYDLKKGIFRSADSEEEIFGHLDLDYLEPWERNA

SEQ ID NO: 6079 - DNA, 1182 bp, synthetic construct
  misc_feature 1..1182: note = Variant of terminal deoxynucleotidyl transferase
  source 1..1182: mol_type = other DNA
atgcaccatcatcaccatcacgggggctccggccatccggaaggtaataccccggagaaggaggtgccgagcgttatcgcccgtcatgttagtccgtacgcgtgccagcgcaagaccacgctgaataactacaacaaaaagatcaccgacgcgctggaaatcatggccgagaactacaagtttaaagagaacctgcaggcgcgcctggaggcccgtcgcgccgcgagtgtcctgaaaagcctgccgttcgaggttaccagcatgaaagacatccaaggtctgccgtgcattaccgacgacgtacgtcctgtgatcgaagagatcatcgaagtaggcgagagcagccgtgttaaagaaatcctcaatgacgagcgctacaaggcctttaagcagttcaccagcgtgttcggtgtgggcgtcaagaccgcggaaaagtggtaccgtatgggcctccgtacgctggaagaagcaaaggccagtaagagtctgaagctgaacaagatgcggaaggcgggcttcctgtactacgaggatctggcgagcggtgttagtaaagaagaagccgatgccgttctggatatcgtgaaggaaacggtgcgcactgttagtccggatgcgctggtgaccatcgccggcggtttccgccgtggcaaacctcagggccacgacgttgacctgctgatcacgattccgggccgtcctacggatccggagctgctccacaaagtggttgatctgctcaagaagcaaggtctgctgctgtacggggacatccgtgagcgtacgttcgtggaggggcaactgccaaatcctaaacctgaccagctggacaaccatcagaagtgcttcgccattctcaagctgtaccgtccgaaggtggataacagtgcggttgggacgtcgaagaaagtcgacatggctgaggttaaggattggaaagcggttcgtgtggatctggtggtcgctccagatgagcagttcgcctatgcgctgctcggttggacgggcagcggcatgtttcgtcgcgatactcgtcgctacgcggaggaagagcgcgacatgctgctcgacaaccatggtctctacgacctgaaaaagggcatctttctgagtgcggacagcgaagaagagattttcggtcatctggacctggattatctggagccgcctgaacgcaacgcg

SEQ ID NO: 6080 - protein, 394 aa, synthetic construct
  REGION 1..394: note = Variant of terminal deoxynucleotidyl transferase
MHHHHHHGGSGHPEGNTPEKEVPSVIARHVSPYACQRKTTLNNYNKKITDALEIMAENYKFKENLQARLEARRAASVLKSLPFEVTSMKDIQGLPCITDDVRPVIEEIIEVGESSRVKEILNDERYKAFKQFTSVFGVGVKTAEKWYRMGLRTLEEAKASKSLKLNKMRKAGFLYYEDLASGVSKEEADAVLDIVKETVRTVSPDALVTIAGGFRRGKPQGHDVDLLITIPGRPTDPELLHKVVDLLKKQGLLLYGDIRERTFVEGQLPNPKPDQLDNHQKCFAILKLYRPKVDNSAVGTSKKVDMAEVKDWKAVRVDLVVAPDEQFAYALLGWTGSGMFRRDTRRYAEEERDMLLDNHGLYDLKKGIFLSADSEEEIFGHLDLDYLEPPERNA

SEQ ID NO: 6081 - DNA, 1182 bp, synthetic construct
  misc_feature 1..1182: note = Variant of terminal deoxynucleotidyl transferase
  source 1..1182: mol_type = other DNA
atgcaccatcatcaccatcacgggggctccggccatccggaaggtaataccccggagaaggaggtgccgagcgttatcgcccgtcatgttagtccgtacgcgtgccagcgcaagaccacgctgaataactacaacaaaaagatcaccgacgcgctggaaatcatggccgagaactacaagtttaaagagaacctgcaggcgcgcctggaggcccgtcgcgccgcgagtgtcctgaaaagcctgccgttcgaggttaccagcatgaaagacatccaaggtctgccgtgcattaccgacgacgtacgtcctgtgatcgaagagatcatcgaagtaggcgagagcagccgtgttaaagaaatcctcaatgacgagcgctacaaggcctttaagcagttcaccagcgtgttcggtgtgggcgtcaagaccgcggaaaagtggtaccgtatgggcctccgtacgctggaagaagcaaaggccagtaagagtctgaagctgaacaagatgcagaaggcgggcttcctgtactacgaggatctggcgagcggtgttagtaaagaagaagccgatgccgttctggatatcgtgaaggaaacggtgcgcactgttagtccggatgcgctggtgaccatcgccggcggtttccgccgtggcaaacctcagggccacgacgttgacctgctgatcacgattccgggccgtcctacggatccggagctgctccacaaagtggttgatctgctcaagaagcaaggtctgctgctgtacggggacatccgtgagcgtacgttcgtggaggggcaactgccaaatcctaaacctgaccagctggacaaccatcagaagtgcttcgccattctcaagctgtaccgtccgaaggtggataacagtgcggttgggacgtcgaagaaagtcgacatggctgaggttaaggattggaaagcggttcgtgtggatctggtggtcgctccagatgagcagttcgcctatgcgctgctcggttggacgggcagcggcatgtttcgtcgcgatactcgtcgctacgcggaggaagagcgcgacatgctgctcgacaaccatggtctctacgacctgaaaaagggcatctttctgagtgcggacagcgaagaagagattttcggtcatctggacctggattatctgtatccgtgggaacgcaacgcg

SEQ ID NO: 6082 - protein, 394 aa, synthetic construct
  REGION 1..394: note = Variant of terminal deoxynucleotidyl transferase
MHHHHHHGGSGHPEGNTPEKEVPSVIARHVSPYACQRKTTLNNYNKKITDALEIMAENYKFKENLQARLEARRAASVLKSLPFEVTSMKDIQGLPCITDDVRPVIEEIIEVGESSRVKEILNDERYKAFKQFTSVFGVGVKTAEKWYRMGLRTLEEAKASKSLKLNKMQKAGFLYYEDLASGVSKEEADAVLDIVKETVRTVSPDALVTIAGGFRRGKPQGHDVDLLITIPGRPTDPELLHKVVDLLKKQGLLLYGDIRERTFVEGQLPNPKPDQLDNHQKCFAILKLYRPKVDNSAVGTSKKVDMAEVKDWKAVRVDLVVAPDEQFAYALLGWTGSGMFRRDTRRYAEEERDMLLDNHGLYDLKKGIFLSADSEEEIFGHLDLDYLYPWERNA

SEQ ID NO: 6083 - DNA, 1182 bp, synthetic construct
  misc_feature 1..1182: note = Variant of terminal deoxynucleotidyl transferase
  source 1..1182: mol_type = other DNA
atgcaccatcatcaccatcacgggggctccggccatccggaaggtaataccccggagaaggaggtgccgagcgttatcgcccgtcatgttagtccgtacgcgtgccagcgcaagaccacgctgaataactacaacaaaaagatcaccgacgcgctggaaatcatggccgagaactacaagtttaaagagaacctgcaggcgcgcctggaggcccgtcgcgccgcgagtgtcctgaaaagcctgccgttcgaggttaccagcatgaaagacatccaaggtctgccgtgcattaccgacgacgtacgtcctgtgatcgaagagatcatcgaagtaggcgagagcagccgtgttaaagaaatcctcaatgacgagcgctacaaggcctttaagcagttcaccagcgtgttcggtgtgggcgtcaagaccgcggaaaagtggtaccgtatgggcctccgtacgctggaagaagcaaaggccagtaagagtctgaagctgaacaagatgcagaaggcgggcttcctgtactacgaggatctggcgagcggtgttagtaaagaagaagccgatgccgttctggatatcgtgaaggaaacggtgcgcactgttagtccggatgcgctggtgaccatcgccggcggtttccgccgtggcaaacctcagggccacgacgttgacctgctgatcacgattccgggccgtcctacggatccggagctgctccacaaagtggttgatctgctcaagaagcaaggtctgctgctgtacggggacatccgtgagcgtacgttcgtggaggggcaactgccaaatcctaaacctgaccagctggacaaccatcagaagtgcttcgccattctcaagctgtaccgtccgaaggtggataacagtgcggttgggacgtcgaagaaagtcgacatggctgaggttaaggattggaaagcggttcgtgtggatctggtggtcgctccagatgagcagttcgcctatgcgctgctcggttggacgggcagcggcatgtttcgtcgcgatactcgtcgctacgcggaggaagagcgcgacatgctgctcgacaaccatggtctctacgacctgaaaaagggcatctttctgagtgcggacagcgaagaagagattttcggtcatctggacctgcattatctggagccgtgggaacgcaacgcg

SEQ ID NO: 6084 - protein, 394 aa, synthetic construct
  REGION 1..394: note = Variant of terminal deoxynucleotidyl transferase
MHHHHHHGGSGHPEGNTPEKEVPSVIARHVSPYACQRKTTLNNYNKKITDALEIMAENYKFKENLQARLEARRAASVLKSLPFEVTSMKDIQGLPCITDDVRPVIEEIIEVGESSRVKEILNDERYKAFKQFTSVFGVGVKTAEKWYRMGLRTLEEAKASKSLKLNKMQKAGFLYYEDLASGVSKEEADAVLDIVKETVRTVSPDALVTIAGGFRRGKPQGHDVDLLITIPGRPTDPELLHKVVDLLKKQGLLLYGDIRERTFVEGQLPNPKPDQLDNHQKCFAILKLYRPKVDNSAVGTSKKVDMAEVKDWKAVRVDLVVAPDEQFAYALLGWTGSGMFRRDTRRYAEEERDMLLDNHGLYDLKKGIFLSADSEEEIFGHLDLHYLEPWERNA

SEQ ID NO: 6085 - DNA, 1182 bp, synthetic construct
  misc_feature 1..1182: note = Variant of terminal deoxynucleotidyl transferase
  source 1..1182: mol_type = other DNA
atgcaccatcatcaccatcacgggggctccggccatccggaaggtaataccccggagaaggaggtgccgagcgttatcgcccgtcatgttagtccgtacgcgtgccagcgcaagaccacgctgaataactacaacaaaaagatcaccgacgcgctggaaatcatggccgagaactacaagtttaaagagaacctgcaggcgcgcctggaggcccgtcgcgccgcgagtgtcctgaaaagcctgccgttcgaggttaccagcatgaaagacatccaaggtctgccgtgcattaccgacgacgtacgtcctgtgatcgaagagatcatcgaagtaggcgagagcagccgtgttaaagaaatcctcaatgacgagcgctacaaggcctttaagcagttcaccagcgtgttcggtgtgggcgtcaagaccgcggaaaagtggtaccgtatgggcctccgtacgctggaagaagcaaaggccagtaagagtctgaagctgaacaagatgcagaaggcgggcttcctgtactacgaggatctggcgagcggtgttagtaaagaagaagccgatgccgttctggatatcgtgaaggaaacggtgcgcactgttagtccggatgcgctggtgaccatcgccggcggtttccgccgtggcaaacctcagggccacgacgttgacctgctgatcacgattccgggccgtcctacggatccggagctgctccacaaagtggttgatctgctcaagaagcaaggtctgctgctgtacggggacatccgtgagcgtacgttcgtggaggggcaactgccaaatcctaaacctgaccagctggacaaccatcagaagtgcttcgccattctcaagctgtaccgtccgaaggtggataacagtgcggttgggacgtcgaagaaagtcgacatggctgaggttaaggattggaaagcggttcgtgtggatctggtggtcgctccagatgagcagttcgagtatgcgctgctcggttggacgggcagcggcatgtttcgtcgcgatactcgtcgctacgcggaggaagagcgcgacatgctgctcgacaaccatggtctctacgacctgaaaaagggcatctttctgagtgcggacagcgaagaagagattttcggtcatctggacctggattatctggagccgtgggaacgcaacgcg

SEQ ID NO: 6086 - protein, 394 aa, synthetic construct
  REGION 1..394: note = Variant of terminal deoxynucleotidyl transferase
MHHHHHHGGSGHPEGNTPEKEVPSVIARHVSPYACQRKTTLNNYNKKITDALEIMAENYKFKENLQARLEARRAASVLKSLPFEVTSMKDIQGLPCITDDVRPVIEEIIEVGESSRVKEILNDERYKAFKQFTSVFGVGVKTAEKWYRMGLRTLEEAKASKSLKLNKMQKAGFLYYEDLASGVSKEEADAVLDIVKETVRTVSPDALVTIAGGFRRGKPQGHDVDLLITIPGRPTDPELLHKVVDLLKKQGLLLYGDIRERTFVEGQLPNPKPDQLDNHQKCFAILKLYRPKVDNSAVGTSKKVDMAEVKDWKAVRVDLVVAPDEQFEYALLGWTGSGMFRRDTRRYAEEERDMLLDNHGLYDLKKGIFLSADSEEEIFGHLDLDYLEPWERNA

SEQ ID NO: 6087 - DNA, 1182 bp, synthetic construct
  misc_feature 1..1182: note = Variant of terminal deoxynucleotidyl transferase
  source 1..1182: mol_type = other DNA
atgcaccatcatcaccatcacgggggctccggccatccggaaggtaataccccggagaaggaggtgccgagcgttatcgcccgtcatgttagtccgtacgcgtgccagcgcaagaccacgctgaataactacaacaaaaagatcaccgacgcgctggaaatcatggccgagaactacaagtttaaagagaacctgcaggcgcgcctggaggcccgtcgcgccgcgagtgtcctgaaaagcctgccgttcgaggttaccagcatgaaagacatccaaggtctgccgtgcattaccgacgacgtacgtcctgtgatcgaagagatcatcgaagtaggcgagagcagccgtgttaaagaaatcctcaatgacgagcgctacaaggcctttaagcagttcaccagcgtgttcggtgtgggcgtcaagaccgcggaaaagtggtaccgtatgggcctccgtacgctggaagaagcaaaggccagtaagagtctgaagctgaacaagatgcagaaggcgggcttcctgtactacgaggatctggcgagcggtgttagtaaagaagaagccgatgccgttctggatatcgtgaaggaaacggtgcgcactgttagtccggatgcgctggtgaccatcgccggcggtttccgccgtggcaaacctcagggccacgacgttgacctgctgatcacgattccgggccgtcctacggatccggagctgctccacaaagtggttgatctgctcaagaagcaaggtctgctgctgtacggggacatccgtgagcgtacgttcgtggaggggcaactgccaaatcctaaacctgaccagctggacaaccatcagaagtgcttcgccattctcaagctgtaccgtccgaaggtggataacagtgcggttgggacgtcgaagaaagtcgacatggctgaggttaaggattggaaagcggttcgtgtggatctggtggtcgctccagatgagcagttcgcctatgcgctgctcggttggacgggcagcggcatgtttcgtcgcgatactcgtcgctacgcggaggaagagcgcgacatgctgctcgacaaccatggtctctacgacctgaaaaagggcatctttctgagtgcggacagcgaagaagagattttcggtcatctggacatggattatctggagccgtgggaacgcaacgcg

SEQ ID NO: 6088 - protein, 394 aa, synthetic construct
  REGION 1..394: note = Variant of terminal deoxynucleotidyl transferase
MHHHHHHGGSGHPEGNTPEKEVPSVIARHVSPYACQRKTTLNNYNKKITDALEIMAENYKFKENLQARLEARRAASVLKSLPFEVTSMKDIQGLPCITDDVRPVIEEIIEVGESSRVKEILNDERYKAFKQFTSVFGVGVKTAEKWYRMGLRTLEEAKASKSLKLNKMQKAGFLYYEDLASGVSKEEADAVLDIVKETVRTVSPDALVTIAGGFRRGKPQGHDVDLLITIPGRPTDPELLHKVVDLLKKQGLLLYGDIRERTFVEGQLPNPKPDQLDNHQKCFAILKLYRPKVDNSAVGTSKKVDMAEVKDWKAVRVDLVVAPDEQFAYALLGWTGSGMFRRDTRRYAEEERDMLLDNHGLYDLKKGIFLSADSEEEIFGHLDMDYLEPWERNA

SEQ ID NO: 6089 - DNA, 1182 bp, synthetic construct
  misc_feature 1..1182: note = Variant of terminal deoxynucleotidyl transferase
  source 1..1182: mol_type = other DNA
atgcaccatcatcaccatcacgggggctccggccatccggaaggtaataccccggagaaggaggtgccgagcgttatcgcccgtcatgttagtccgtacgcgtgccagcgcaagaccacgctgaataactacaacaaaaagatcaccgacgcgctggaaatcatggccgagaactacaagtttaaagagaacctgcaggcgcgcctggaggcccgtcgcgccgcgagtgtcctgaaaagcctgccgttcgaggttaccagcatgaaagacatccaaggtctgccgtgcattaccgacgacgtacgtcctgtgatcgaagagatcatcgaagtaggcgagagcagccgtgttaaagaaatcctcaatgacgagcgctacaaggcctttaagcagttcaccagcgtgttcggtgtgggcgtcaagaccgcggaaaagtggtaccgtatgggcctccgtacgctggaagaagcaaaggccagtaagagtctgaagctgaacaagatgcagaaggcgggcttcctgtactacgaggatctggcgagcggtgttagtaaagaagaagccgatgccgttctggatatcgtgaaggaaacggtgcgcactgttagtccggatgcgctggtgaccatcgccggcggtttccgccgtggcaaacctcagggccacgacgttgacctgctgatcacgattccgggccgtcctacggatccggagctgctccacaaagtggttgatctgctcaagaagcaaggtctgctgctgtacggggacatccgtgagcgtacgttcgtggaggggcaactgccaaatcctaaacctgaccagctggacaaccatcagaagtgcttcgccattctcaagctgtaccgtccgaaggtggataacagtgcggttgggacgtcgaagaaagtcgacatggctgaggttaaggattggaaagcggttcgtgtggatctggtggtcgctccagatgagcagttcgcctatgcgctgctcggttggacgggcagcggcatgtttcgtcgcgatactcgtcgctacgcggaggaagagcgcgacatgctgctcgacaaccatggtctctacgacctgaaaaagggcatctttctgagtgcggacagcgaagaagcgattttcggtcatctggacctggattatctggagccgtgggaacgcaacgcg

SEQ ID NO: 6090 - protein, 394 aa, synthetic construct
  REGION 1..394: note = Variant of terminal deoxynucleotidyl transferase
MHHHHHHGGSGHPEGNTPEKEVPSVIARHVSPYACQRKTTLNNYNKKITDALEIMAENYKFKENLQARLEARRAASVLKSLPFEVTSMKDIQGLPCITDDVRPVIEEIIEVGESSRVKEILNDERYKAFKQFTSVFGVGVKTAEKWYRMGLRTLEEAKASKSLKLNKMQKAGFLYYEDLASGVSKEEADAVLDIVKETVRTVSPDALVTIAGGFRRGKPQGHDVDLLITIPGRPTDPELLHKVVDLLKKQGLLLYGDIRERTFVEGQLPNPKPDQLDNHQKCFAILKLYRPKVDNSAVGTSKKVDMAEVKDWKAVRVDLVVAPDEQFAYALLGWTGSGMFRRDTRRYAEEERDMLLDNHGLYDLKKGIFLSADSEEAIFGHLDLDYLEPWERNA

SEQ ID NO: 6091 - DNA, 1182 bp, synthetic construct
  misc_feature 1..1182: note = Variant of terminal deoxynucleotidyl transferase
  source 1..1182: mol_type = other DNA
atgcaccatcatcaccatcacgggggctccggccatccggaaggtaataccccggagaaggaggtgccgagcgttatcgcccgtcatgttagtccgtacgcgtgccagcgcaagaccacgctgaataactacaacaaaaagatcaccgacgcgctggaaatcatggccgagaactacaagtttaaagagaacctgcaggcgcgcctggaggcccgtcgcgccgcgagtgtcctgaaaagcctgccgttcgaggttaccagcatgaaagacatccaaggtctgccgtgcattaccgacgacgtacgtcctgtgatcgaagagatcatcgaagtaggcgagagcagccgtgttaaagaaatcctcaatgacgagcgctacaaggcctttaagcagttcaccagcgtgttcggtgtgggcgtcaagaccgcggaaaagtggtaccgtatgggcctccgtacgctggaagaagcaaaggccagtaagagtctgaagctgaacaagatgcagaaggcgggcttcctgtactacgaggatctggcgagcggtgttagtaaagaagaagccgatgccgttctggatatcgtgaaggaaacggtgcgcactgttagtccggatgcgctggtgaccatcgccggcggtttccgccgtggcaaacctcagggccacgacgttgacctgctgatcacgattccgggccgtcctacggatccggagctgctccacaaagtggttgatctgctcaagaagcaaggtctgctgctgtacggggacatccgtgagcgtacgttcgtggaggggcaactgccaaatcctaaacctgaccagctggacaaccatcagaagtgcttcgccattctcaagctgtaccgtccgaaggtggataacagtgcggttgggacgtcgaagaaagtcgacatggctgaggttaaggattggaaagcggttcgtgtggatctggtggtcgctccagatgagcagttcgcctatgcgctgctcggttggacgggcagcggcatgtttcgtcgcgatactcgtcgctacgcggaggaagagcgcgacatgctgctcgacaaccatggtctctacgacctgaaaaagggcatctttctgagtgcggacagcgaagaaactattttcggtcatctggacctggattatctggagccgtgggaacgcaacgcg

SEQ ID NO: 6092 - protein, 394 aa, synthetic construct
  REGION 1..394: note = Variant of terminal deoxynucleotidyl transferase
MHHHHHHGGSGHPEGNTPEKEVPSVIARHVSPYACQRKTTLNNYNKKITDALEIMAENYKFKENLQARLEARRAASVLKSLPFEVTSMKDIQGLPCITDDVRPVIEEIIEVGESSRVKEILNDERYKAFKQFTSVFGVGVKTAEKWYRMGLRTLEEAKASKSLKLNKMQKAGFLYYEDLASGVSKEEADAVLDIVKETVRTVSPDALVTIAGGFRRGKPQGHDVDLLITIPGRPTDPELLHKVVDLLKKQGLLLYGDIRERTFVEGQLPNPKPDQLDNHQKCFAILKLYRPKVDNSAVGTSKKVDMAEVKDWKAVRVDLVVAPDEQFAYALLGWTGSGMFRRDTRRYAEEERDMLLDNHGLYDLKKGIFLSADSEETIFGHLDLDYLEPWERNA

SEQ ID NO: 6093 - DNA, 1182 bp, synthetic construct
  misc_feature 1..1182: note = Variant of terminal deoxynucleotidyl transferase
  source 1..1182: mol_type = other DNA
atgcaccatcatcaccatcacgggggctccggccatccggaaggtaataccccggagaaggaggtgccgagcgttatcgcccgtcatgttagtccgtacgcgtgccagcgcaagaccacgctgaataactacaacaaaaagatcaccgacgcgctggaaatcatggccgagaactacaagtttaaagagaacctgcaggcgcgcctggaggcccgtcgcgccgcgagtgtcctgaaaagcctgccgttcgaggttaccagcatgaaagacatccaaggtctgccgtgcattaccgacgacgtacgtcctgtgatcgaagagatcatcgaagtaggcgagagcagccgtgttaaagaaatcctcaatgacgagcgctacaaggcctttaagcagttcaccagcgtgttcggtgtgggcgtcaagaccgcggaaaagtggtaccgtatgggcctccgtacgctggaagaagcaaaggccagtaagagtctgaagctgaacaagatgcagaaggcgggcttcctgtactacgaggatctggcgagcggtgttagtaaagaagaagccgatgccgttctggatatcgtgaaggaaacggtgcgcactgttagtccggatgcgctggtgaccatcgccggcggtttccgccgtggcaaacctcagggccacgacgttgacctgctgatcacgattccgggccgtcctacggatccggagctgctccacaaagtggttgatctgctcaagaagcaaggtctgctgctgtacggggacatccgtgagcgtacgttcgtggaggggcaactgccaaatcctaaacctgaccagctggacaaccatcagaagtgcttcgccattctcaagctgtaccgtccgaaggtggataacagtgcggttgggacgtcgaagaaagtcgacatggctgaggttaaggattggaaagcggttcgtgtggatctggtggtcgctccagatgagcagttcgcctatgcgctgattggttggacgggcagcggcatgtttcgtcgcgatactcgtcgctacgcggaggaagagcgcgacatgctgctcgacaaccatggtctctacgacctgaaaaagggcatctttctgagtgcggacagcgaagaagagattttcggtcatctggacctggattatctggagccgtgggaacgcaacgcg

SEQ ID NO: 6094 - protein, 394 aa, synthetic construct
  REGION 1..394: note = Variant of terminal deoxynucleotidyl transferase
MHHHHHHGGSGHPEGNTPEKEVPSVIARHVSPYACQRKTTLNNYNKKITDALEIMAENYKFKENLQARLEARRAASVLKSLPFEVTSMKDIQGLPCITDDVRPVIEEIIEVGESSRVKEILNDERYKAFKQFTSVFGVGVKTAEKWYRMGLRTLEEAKASKSLKLNKMQKAGFLYYEDLASGVSKEEADAVLDIVKETVRTVSPDALVTIAGGFRRGKPQGHDVDLLITIPGRPTDPELLHKVVDLLKKQGLLLYGDIRERTFVEGQLPNPKPDQLDNHQKCFAILKLYRPKVDNSAVGTSKKVDMAEVKDWKAVRVDLVVAPDEQFAYALIGWTGSGMFRRDTRRYAEEERDMLLDNHGLYDLKKGIFLSADSEEEIFGHLDLDYLEPWERNA

SEQ ID NO: 6095 - DNA, 1182 bp, synthetic construct
  misc_feature 1..1182: note = Variant of terminal deoxynucleotidyl transferase
  source 1..1182: mol_type = other DNA
atgcaccatcatcaccatcacgggggctccggccatccggaaggtaataccccggagaaggaggtgccgagcgttatcgcccgtcatgttagtccgtacgcgtgccagcgcaagaccacgctgaataactacaacaaaaagatcaccgacgcgctggaaatcatggccgagaactacaagtttaaagagaacctgcaggcgcgcctggaggcccgtcgcgccgcgagtgtcctgaaaagcctgccgttcgaggttaccagcatgaaagacatccaaggtctgccgtgcattaccgacgacgtacgtcctgtgatcgaagagatcatcgaagtaggcgagagcagccgtgttaaagaaatcctcaatgacgagcgctacaaggcctttaagcagttcaccagcgtgttcggtgtgggcgtcaagaccgcggaaaagtggtaccgtatgggcctccgtacgctggaagaagcaaaggccagtaagagtctgaagctgaacaagatgcagaaggcgggcttcctgtactacgaggatctggcgagcggtgttagtaaagaagaagccgatgccgttctggatatcgtgaaggaaacggtgcgcactgttagtccggatgcgctggtgaccatcgccggcggtttccgccgtggcaaacctcagggccacgacgttgacctgctgatcacgattccgggccgtcctacggatccggagctgctccacaaagtggttgatctgctcaagaagcaaggtctgctgctgtacggggacatccgtgagcgtacgttcgtggctgggcaactgccaaatcctaaacctgaccagctggacaaccatcagaagtgcttcgccattctcaagctgtaccgtccgaaggtggataacagtgcggttgggacgtcgaagaaagtcgacatggctgaggttaaggattggaaagcggttcgtgtggatctggtggtcgctccagatgagcagttcgcctatgcgctgctcggttggacgggcagcggcatgtttcgtcgcgatactcgtcgctacgcggaggaagagcgcgacatgctgctcgacaaccatggtctctacgacctgaaaaagggcatctttctgagtgcggacagcgaagaagagattttcggtcatctggacctggattatctggagccgtgggaacgcaacgcg

SEQ ID NO: 6096 - protein, 394 aa, synthetic construct
  REGION 1..394: note = Variant of terminal deoxynucleotidyl transferase
MHHHHHHGGSGHPEGNTPEKEVPSVIARHVSPYACQRKTTLNNYNKKITDALEIMAENYKFKENLQARLEARRAASVLKSLPFEVTSMKDIQGLPCITDDVRPVIEEIIEVGESSRVKEILNDERYKAFKQFTSVFGVGVKTAEKWYRMGLRTLEEAKASKSLKLNKMQKAGFLYYEDLASGVSKEEADAVLDIVKETVRTVSPDALVTIAGGFRRGKPQGHDVDLLITIPGRPTDPELLHKVVDLLKKQGLLLYGDIRERTFVAGQLPNPKPDQLDNHQKCFAILKLYRPKVDNSAVGTSKKVDMAEVKDWKAVRVDLVVAPDEQFAYALLGWTGSGMFRRDTRRYAEEERDMLLDNHGLYDLKKGIFLSADSEEEIFGHLDLDYLEPWERNA

SEQ ID NO: 6097 - DNA, 1182 bp, synthetic construct
  misc_feature 1..1182: note = Variant of terminal deoxynucleotidyl transferase
  source 1..1182: mol_type = other DNA
atgcaccatcatcaccatcacgggggctccggccatccggaaggtaataccccggagaaggaggtgccgagcgttatcgcccgtcatgttagtccgtacgcgtgccagcgcaagaccacgctgaataactacaacaaaaagatcaccgacgcgctggaaatcatggccgagaactacaagtttaaagagaacctgcaggcgcgcctggaggcccgtcgcgccgcgagtgtcctgaaaagcctgccgttcgaggttaccagcatgaaagacatccaaggtctgccgtgcattaccgacgacgtacgtcctgtgatcgaagagatcatcgaagtaggcgagagcagccgtgttaaagaaatcctcaatgacgagcgctacaaggcctttaagcagttcaccagcgtgttcggtgtgggcgtcaagaccgcggaaaagtggtaccgtatgggcctccgtacgctggaagaagcaaaggccagtaagagtctgaagctgaacaagatgcagaaggcgggcttcctgtactacgaggatctggcgagcggtgttagtaaagaagaagccgatgccgttctggatatcgtgaaggaaacggtgcgcactgttagtccggatgcgctggtgaccatcgccggcggtttccgccgtggcaaacctcagggccacgacgttgacctgctgatcacgattccgggccgtcctacggatccggagctgctccacaaagtggttgatctgctcaagaagcaaggtctgctgctgtacggggacatccgtgagcgtacgttcgtggaggggcaactgccaaatcctaaacctgaccagctggacaaccatcagaagtgcttcgccattctcaagctgtaccgtccgaaggtggataacagtgcggttgggacgtcgaagaaagtcgacatggctgaggttaaggattggaaagcggttcgtgtggatctggtggtcgctccagatgagcagttcgcctatgcgctgctcggttggacgggcagcggcatgtttcgtcgcgatactcgtcgctacgcggaggaagagcgcgacatgctgctcgacaaccatggtctctacgacctgaaaaagggcatctttctgagtgcggacagcgaagaagagattttcggtcatctgaatctggattatctggagccgtgggaacgcaacgcg

SEQ ID NO: 6098 - protein, 394 aa, synthetic construct
  REGION 1..394: note = Variant of terminal deoxynucleotidyl transferase
MHHHHHHGGSGHPEGNTPEKEVPSVIARHVSPYACQRKTTLNNYNKKITDALEIMAENYKFKENLQARLEARRAASVLKSLPFEVTSMKDIQGLPCITDDVRPVIEEIIEVGESSRVKEILNDERYKAFKQFTSVFGVGVKTAEKWYRMGLRTLEEAKASKSLKLNKMQKAGFLYYEDLASGVSKEEADAVLDIVKETVRTVSPDALVTIAGGFRRGKPQGHDVDLLITIPGRPTDPELLHKVVDLLKKQGLLLYGDIRERTFVEGQLPNPKPDQLDNHQKCFAILKLYRPKVDNSAVGTSKKVDMAEVKDWKAVRVDLVVAPDEQFAYALLGWTGSGMFRRDTRRYAEEERDMLLDNHGLYDLKKGIFLSADSEEEIFGHLNLDYLEPWERNA

SEQ ID NO: 6099 - DNA, 1182 bp, synthetic construct
  misc_feature 1..1182: note = Variant of terminal deoxynucleotidyl transferase
  source 1..1182: mol_type = other DNA
atgcaccatcatcaccatcacgggggctccggccatccggaaggtaataccccggagaaggaggtgccgagcgttatcgcccgtcatgttagtccgtacgcgtgccagcgcaagaccacgctgaataactacaacaaaaagatcaccgacgcgctggaaatcatggccgagaactacaagtttaaagagaacctgcaggcgcgcctggaggcccgtcgcgccgcgagtgtcctgaaaagcctgccgttcgaggttaccagcatgaaagacatccaaggtctgccgtgcattaccgacgacgtacgtcctgtgatcgaagagatcatcgaagtaggcgagagcagccgtgttaaagaaatcctcaatgacgagcgctacaaggcctttaagcagttcaccagcgtgttcggtgtgggcgtcaagaccgcggaaaagtggtaccgtatgggcctccgtacgctggaagaagcaaaggccagtaagagtctgaagctgaacaagatgcagaaggcgggcttcctgtactacgaggatctggcgagcggtgttagtaaagaagaagccgatgccgttctggatatcgtgaaggaaacggtgcgcactgttagtccggatgcgctggtgaccatcgccggcggtttccgccgtggcaaacctcagggccacgacgttgacctgctgatcacgattccgggccgtcctacggatccggagctgctccacaaagtggttgatctgctcaagaagcaaggtctgctgctgtacggggacatccgtgagcgtacgttcgtggaggggcaactgccaaatcctaaacctgaccagctggacaaccatcagaagtgcttcgccattctcaagctgtaccgtccgaaggtggataacagtgcggttgggacgtcgaagaaagtcgacatggctgaggttaaggattggaaagcggttcgtgtggatctggtggtcgctccagatgagcagttcgcctatgcgctgctcggttggacgggcagcggcatgtttcgtcgcgatactcgtcgctacgcggaggaagagcgcgacatgctgctcgacaaccatggtctctacgacctgaaaaagggcatctttctgagtgcggacagcgaagaagagattttcggtcatctggacctggatgtgctggagccgtgggaacgcaacgcg

SEQ ID NO: 6100 - protein, 394 aa, synthetic construct
  REGION 1..394: note = Variant of terminal deoxynucleotidyl transferase
MHHHHHHGGSGHPEGNTPEKEVPSVIARHVSPYACQRKTTLNNYNKKITDALEIMAENYKFKENLQARLEARRAASVLKSLPFEVTSMKDIQGLPCITDDVRPVIEEIIEVGESSRVKEILNDERYKAFKQFTSVFGVGVKTAEKWYRMGLRTLEEAKASKSLKLNKMQKAGFLYYEDLASGVSKEEADAVLDIVKETVRTVSPDALVTIAGGFRRGKPQGHDVDLLITIPGRPTDPELLHKVVDLLKKQGLLLYGDIRERTFVEGQLPNPKPDQLDNHQKCFAILKLYRPKVDNSAVGTSKKVDMAEVKDWKAVRVDLVVAPDEQFAYALLGWTGSGMFRRDTRRYAEEERDMLLDNHGLYDLKKGIFLSADSEEEIFGHLDLDVLEPWERNA

SEQ ID NO: 6101 - DNA, 1182 bp, synthetic construct
  misc_feature 1..1182: note = Variant of terminal deoxynucleotidyl transferase
  source 1..1182: mol_type = other DNA
atgcaccatcatcaccatcacgggggctccggccatccggaaggtaataccccggagaaggaggtgccgagcgttatcgcccgtcatgttagtccgtacgcgtgccagcgcaagaccacgctgaataactacaacaaaaagatcaccgacgcgctggaaatcatggccgagaactacaagtttaaagagaacctgcaggcgcgcctggaggcccgtcgcgccgcgagtgtcctgaaaagcctgccgttcgaggttaccagcatgaaagacatccaaggtctgccgtgcattaccgacgacgtacgtcctgtgatcgaagagatcatcgaagtaggcgagagcagccgtgttaaagaaatcctcaatgacgagcgctacaaggcctttaagcagttcaccagcgtgttcggtgtgggcgtcaagaccgcggaaaagtggtaccgtatgggcctccgtacgctggaagaagcaaaggccagtaagagtctgaagctgaacaagatgcagaaggcgggcttcctgtactacgaggatctggcgagcggtgttagtaaagaagaagccgatgccgttctggatatcgtgaaggaaacggtgcgcactgttagtccggatgcgctggtgaccatcgccggcggtttccgccgtggcaaacctcagggccacgacgttgacctgctgatcacgattccgggccgtcctacggatccggagctgctccacaaagtggttgatctgctcaagaagcaaggtctgctgctgtacggggacatccgtgagcgtacgttcgtgagtgggcaactgccaaatcctaaacctgaccagctggacaaccatcagaagtgcttcgccattctcaagctgtaccgtccgaaggtggataacagtgcggttgggacgtcgaagaaagtcgacatggctgaggttaaggattggaaagcggttcgtgtggatctggtggtcgctccagatgagcagttcgcctatgcgctgctcggttggacgggcagcggcatgtttcgtcgcgatactcgtcgctacgcggaggaagagcgcgacatgctgctcgacaaccatggtctctacgacctgaaaaagggcatctttctgagtgcggacagcgaagaagagattttcggtcatctggacctggattatctggagccgtgggaacgcaacgcg

SEQ ID NO: 6102 - protein, 394 aa, synthetic construct
  REGION 1..394: note = Variant of terminal deoxynucleotidyl transferase
MHHHHHHGGSGHPEGNTPEKEVPSVIARHVSPYACQRKTTLNNYNKKITDALEIMAENYKFKENLQARLEARRAASVLKSLPFEVTSMKDIQGLPCITDDVRPVIEEIIEVGESSRVKEILNDERYKAFKQFTSVFGVGVKTAEKWYRMGLRTLEEAKASKSLKLNKMQKAGFLYYEDLASGVSKEEADAVLDIVKETVRTVSPDALVTIAGGFRRGKPQGHDVDLLITIPGRPTDPELLHKVVDLLKKQGLLLYGDIRERTFVSGQLPNPKPDQLDNHQKCFAILKLYRPKVDNSAVGTSKKVDMAEVKDWKAVRVDLVVAPDEQFAYALLGWTGSGMFRRDTRRYAEEERDMLLDNHGLYDLKKGIFLSADSEEEIFGHLDLDYLEPWERNA

SEQ ID NO: 6103 - DNA, 1182 bp, synthetic construct
  misc_feature 1..1182: note = Variant of terminal deoxynucleotidyl transferase
  source 1..1182: mol_type = other DNA
atgcaccatcatcaccatcacgggggctccggccatccggaaggtaataccccggagaaggaggtgccgagcgttatcgcccgtcatgttagtccgtacgcgtgccagcgcaagaccacgctgaataactacaacaaaaagatcaccgacgcgctggaaatcatggccgagaactacaagtttaaagagaacctgcaggcgcgcctggaggcccgtcgcgccgcgagtgtcctgaaaagcctgccgttcgaggttaccagcatgaaagacatccaaggtctgccgtgcattaccgacgacgtacgtcctgtgatcgaagagatcatcgaagtaggcgagagcagccgtgttaaagaaatcctcaatgacgagcgctacaaggcctttaagcagttcaccagcgtgttcggtgtgggcgtcaagaccgcggaaaagtggtaccgtatgggcctccgtacgctggaagaagcaaaggccagtaagagtctgaagctgaacaagatgcagaaggcgggcttcctgtactacgaggatctggcgagcggtgttagtaaagaagaagccgatgccgttctggatatcgtgaaggaaacggtgcgcactgttagtccggatgcgctggtgaccatcgccggcggtttccgccgtggcaaacctcagggccacgacgttgacctgctgatcacgattccgggccgtcctacggatccggagctgctccacaaagtggttgatctgctcaagaagcaaggtctgctgctgtacggggacatccgtgagcgtacgttcgtggaggggcaactgccaaatcctaaacctgaccagctggacaaccatcagaagtgcttcgccattctcaagctgtaccgtccgaaggtggataacagtgcggttgggacgtcgaagaaagtcgacatggctgaggttaaggattggaaagcggttcgtgtggatctggtggtcgctccagatgagcagttcgcctatgcgctgctcggttggacgggcagcggcatgtttcgtcgcgatactcgtcgctacgcggaggaagagcgcgacatgctgctcgacaaccatggtctctacgacctgaaaaagggcatctttagtagtgcggacagcgaagaagagattttcggtcatctggacctggattatctggagccgtgggaacgcaacgcg

SEQ ID NO: 6104 - protein, 394 aa, synthetic construct
  REGION 1..394: note = Variant of terminal deoxynucleotidyl transferase
MHHHHHHGGSGHPEGNTPEKEVPSVIARHVSPYACQRKTTLNNYNKKITDALEIMAENYKFKENLQARLEARRAASVLKSLPFEVTSMKDIQGLPCITDDVRPVIEEIIEVGESSRVKEILNDERYKAFKQFTSVFGVGVKTAEKWYRMGLRTLEEAKASKSLKLNKMQKAGFLYYEDLASGVSKEEADAVLDIVKETVRTVSPDALVTIAGGFRRGKPQGHDVDLLITIPGRPTDPELLHKVVDLLKKQGLLLYGDIRERTFVEGQLPNPKPDQLDNHQKCFAILKLYRPKVDNSAVGTSKKVDMAEVKDWKAVRVDLVVAPDEQFAYALLGWTGSGMFRRDTRRYAEEERDMLLDNHGLYDLKKGIFSSADSEEEIFGHLDLDYLEPWERNA

SEQ ID NO: 6105 - DNA, 1182 bp, synthetic construct
  misc_feature 1..1182: note = Variant of terminal deoxynucleotidyl transferase
  source 1..1182: mol_type = other DNA
atgcaccatcatcaccatcacgggggctccggccatccggaaggtaataccccggagaaggaggtgccgagcgttatcgcccgtcatgttagtccgtacgcgtgccagcgcaagaccacgctgaataactacaacaaaaagatcaccgacgcgctggaaatcatggccgagaactacaagtttaaagagaacctgcaggcgcgcctggaggcccgtcgcgccgcgagtgtcctgaaaagcctgccgttcgaggttaccagcatgaaagacatccaaggtctgccgtgcattaccgacgacgtacgtcctgtgatcgaagagatcatcgaagtaggcgagagcagccgtgttaaagaaatcctcaatgacgagcgctacaaggcctttaagcagttcaccagcgtgttcggtgtgggcgtcaagaccgcggaaaagtggtaccgtatgggcctccgtacgctggaagaagcaaaggccagtaagagtctgaagctgaacaagatgcagaaggcgggcttcctgtactacgaggatctggcgagcggtgttagtaaagaagaagccgatgccgttctggatatcgtgaaggaaacggtgcgcactgttagtccggatgcgctggtgaccatcgccggcggtttccgccgtggcaaacctcagggccacgacgttgacctgctgatcacgattccgggccgtcctacggatccggagctgctccacaaagtggttgatctgctcaagaagcaaggtctgctgctgtacggggacatccgtgagcgtacgttcgtggaggggcaactgccaaatcctaaacctgaccagctggacaaccatcagaagtgcttcgccattctcaagctgtaccgtccgaaggtggataacagtgcggttgggacgtcgaagaaagtcgacatggctgaggttaaggattggaaagcggttcgtgtggatctggtggtcgctccagatgagcagttcgcctatgcgctgctcggttggacgggcagcggcatgtttcgtcgcgatactcgtcgctacgcggaggaagagcgcgacatgctgctcgacaaccatggtctctacctgctgaaaaagggcatctttctgagtgcggacagcgaagaagagattttcggtcatctggacctggattatctggagccgtgggaacgcaacgcg

SEQ ID NO: 6106 - protein, 394 aa, synthetic construct
  REGION 1..394: note = Variant of terminal deoxynucleotidyl transferase
MHHHHHHGGSGHPEGNTPEKEVPSVIARHVSPYACQRKTTLNNYNKKITDALEIMAENYKFKENLQARLEARRAASVLKSLPFEVTSMKDIQGLPCITDDVRPVIEEIIEVGESSRVKEILNDERYKAFKQFTSVFGVGVKTAEKWYRMGLRTLEEAKASKSLKLNKMQKAGFLYYEDLASGVSKEEADAVLDIVKETVRTVSPDALVTIAGGFRRGKPQGHDVDLLITIPGRPTDPELLHKVVDLLKKQGLLLYGDIRERTFVEGQLPNPKPDQLDNHQKCFAILKLYRPKVDNSAVGTSKKVDMAEVKDWKAVRVDLVVAPDEQFAYALLGWTGSGMFRRDTRRYAEEERDMLLDNHGLYLLKKGIFLSADSEEEIFGHLDLDYLEPWERNA

SEQ ID NO: 6107 - DNA, 1182 bp, synthetic construct
  misc_feature 1..1182: note = Variant of terminal deoxynucleotidyl transferase
  source 1..1182: mol_type = other DNA
atgcaccatcatcaccatcacgggggctccggccatccggaaggtaataccccggagaaggaggtgccgagcgttatcgcccgtcatgttagtccgtacgcgtgccagcgcaagaccacgctgaataactacaacaaaaagatcaccgacgcgctggaaatcatggccgagaactacaagtttaaagagaacctgcaggcgcgcctggaggcccgtcgcgccgcgagtgtcctgaaaagcctgccgttcgaggttaccagcatgaaagacatccaaggtctgccgtgcattaccgacgacgtacgtcctgtgatcgaagagatcatcgaagtaggcgagagcagccgtgttaaagaaatcctcaatgacgagcgctacaaggcctttaagcagttcaccagcgtgttcggtgtgggcgtcaagaccgcggaaaagtggtaccgtatgggcctccgtacgctggaagaagcaaaggccagtaagagtctgaagctgaacaagatgcagaaggcgggcttcctgtactacgaggatctggcgagcggtgttagtaaagaagaagccgatgccgttctggatatcgtgaaggaaacggtgcgcactgttagtccggatgcgctggtgaccatcgccggcggtttccgccgtggcaaacctcagggccacgacgttgacctgctgatcacgattccgggccgtcctacggatccggagctgctccacaaagtggttgatctgctcaagaagcaaggtctgctgctgtacggggacatccgtgagcgtacgttcgtggaggggcaactgccaaatcctaaacctgaccagctggacaaccatcagaagtgcttcgccattctcaagctgtaccgtccgaaggtggataacagtgcggttgggacgtcgaagaaagtcgacatggctgaggttaaggattggaaagcggttcgtgtggatctggtggtcgctccagatgagcagttcgcctatgcgctgctcggttggacgggcagcggcatgtttcgtcgcgatactcgtcgctacgcggaggaagagcgcgacatgctgctcgacaaccatggtctctacgacctgaaaaagctgatctttctgagtgcggacagcgaagaagagattttcggtcatctggacctggattatctggagccgtgggaacgcaacgcg

SEQ ID NO: 6108 - protein, 394 aa, synthetic construct
  REGION 1..394: note = Variant of terminal deoxynucleotidyl transferase
MHHHHHHGGSGHPEGNTPEKEVPSVIARHVSPYACQRKTTLNNYNKKITDALEIMAENYKFKENLQARLEARRAASVLKSLPFEVTSMKDIQGLPCITDDVRPVIEEIIEVGESSRVKEILNDERYKAFKQFTSVFGVGVKTAEKWYRMGLRTLEEAKASKSLKLNKMQKAGFLYYEDLASGVSKEEADAVLDIVKETVRTVSPDALVTIAGGFRRGKPQGHDVDLLITIPGRPTDPELLHKVVDLLKKQGLLLYGDIRERTFVEGQLPNPKPDQLDNHQKCFAILKLYRPKVDNSAVGTSKKVDMAEVKDWKAVRVDLVVAPDEQFAYALLGWTGSGMFRRDTRRYAEEERDMLLDNHGLYDLKKLIFLSADSEEEIFGHLDLDYLEPWERNA

SEQ ID NO: 6109 - DNA, 1182 bp, synthetic construct
  misc_feature 1..1182: note = Variant of terminal deoxynucleotidyl transferase
  source 1..1182: mol_type = other DNA
atgcaccatcatcaccatcacgggggctccggccatccggaaggtaataccccggagaaggaggtgccgagcgttatcgcccgtcatgttagtccgtacgcgtgccagcgcaagaccacgctgaataactacaacaaaaagatcaccgacgcgctggaaatcatggccgagaactacaagtttaaagagaacctgcaggcgcgcctggaggcccgtcgcgccgcgagtgtcctgaaaagcctgccgttcgaggttaccagcatgaaagacatccaaggtctgccgtgcattaccgacgacgtacgtcctgtgatcgaagagatcatcgaagtaggcgagagcagccgtgttaaagaaatcctcaatgacgagcgctacaaggcctttaagcagttcaccagcgtgttcggtgtgggcgtcaagaccgcggaaaagtggtaccgtatgggcctccgtacgctggaagaagcaaaggccagtaagagtctgaagctgaacaagatgcagaaggcgggcttcctgtactacgaggatctggcgagcggtgttagtaaagaagaagccgatgccgttctggatatcgtgaaggaaacggtgcgcactgttagtccggatgcgctggtgaccatcgccggcggtttccgccgtggcaaacctcagggccacgacgttgacctgctgatcacgattccgggccgtcctacggatccggagctgctccacaaagtggttgatctgctcaagaagcaaggtctgctgctgtacggggacatccgtgagcgtacgttcgtggaggggcaactgccaaatcctaaacctgaccagctggacaaccatcagaagtgcttcgccattctcaagctgtaccgtccgaaggtggataacagtgcggttgggacgtcgaagaaagtcgacatggctgaggttaaggattggaaagcggttcgtgtggatctggtggtcgctccagatgagcagttcgcctatgcgctgctcggttggacgggcagcggcatgtttcgtcgcgatactcgtcgctacgcggaggaagagcgcgacatgctgctcgacaaccatggtctctacgacctgaaaaagggcatctttctgggggcggacagcgaagaagagattttcggtcatctggacctggattatctggagccgtgggaacgcaacgcg

SEQ ID NO: 6110 - protein, 394 aa, synthetic construct
  REGION 1..394: note = Variant of terminal deoxynucleotidyl transferase
MHHHHHHGGSGHPEGNTPEKEVPSVIARHVSPYACQRKTTLNNYNKKITDALEIMAENYKFKENLQARLEARRAASVLKSLPFEVTSMKDIQGLPCITDDVRPVIEEIIEVGESSRVKEILNDERYKAFKQFTSVFGVGVKTAEKWYRMGLRTLEEAKASKSLKLNKMQKAGFLYYEDLASGVSKEEADAVLDIVKETVRTVSPDALVTIAGGFRRGKPQGHDVDLLITIPGRPTDPELLHKVVDLLKKQGLLLYGDIRERTFVEGQLPNPKPDQLDNHQKCFAILKLYRPKVDNSAVGTSKKVDMAEVKDWKAVRVDLVVAPDEQFAYALLGWTGSGMFRRDTRRYAEEERDMLLDNHGLYDLKKGIFLGADSEEEIFGHLDLDYLEPWERNA

SEQ ID NO: 6111 - DNA, 1182 bp, synthetic construct
  misc_feature 1..1182: note = Variant of terminal deoxynucleotidyl transferase
  source 1..1182: mol_type = other DNA
atgcaccatcatcaccatcacgggggctccggccatccggaaggtaataccccggagaaggaggtgccgagcgttatcgcccgtcatgttagtccgtacgcgtgccagcgcaagaccacgctgaataactacaacaaaaagatcaccgacgcgctggaaatcatggccgagaactacaagtttaaagagaacctgcaggcgcgcctggaggcccgtcgcgccgcgagtgtcctgaaaagcctgccgttcgaggttaccagcatgaaagacatccaaggtctgccgtgcattaccgacgacgtacgtcctgtgatcgaagagatcatcgaagtaggcgagagcagccgtgttaaagaaatcctcaatgacgagcgctacaaggcctttaagcagttcaccagcgtgttcggtgtgggcgtcaagaccgcggaaaagtggtaccgtatgggcctccgtacgctggaagaagcaaaggccagtaagagtctgaagctgaacaagatgcagaaggcgggcttcctgtactacgaggatctggcgagcggtgttagtaaagaagaagccgatgccgttctggatatcgtgaaggaaacggtgcgcactgttagtccggatgcgctggtgaccatcgccggcggtttccgccgtggcaaacctcagggccacgacgttgacctgctgatcacgattccgggccgtcctacggatccggagctgctccacaaagtggttgatctgctcaagaagcaaggtctgctgctgtacggggacatccgtgagcgtacgttcgtggaggggcaactgccaaatcctaaacctgaccagctggacaaccatcagaagtgcttcgccattctcaagctgtaccgtccgaaggtggataacagtgcggttgggacgtcgaagaaagtcgacatggctgaggttaaggattggaaagcggttcgtgtggatctggtggtcgctccagatggtcagttcgcctatgcgctgctcggttggacgggcagcggcatgtttcgtcgcgatactcgtcgctacgcggaggaagagcgcgacatgctgctcgacaaccatggtctctacgacctgaaaaagggcatctttctgagtgcggacagcgaagaagagattttcggtcatctggacctggattatctggagccgtgggaacgcaacgcg

SEQ ID NO: 6112 - protein, 394 aa, synthetic construct
  REGION 1..394: note = Variant of terminal deoxynucleotidyl transferase
MHHHHHHGGSGHPEGNTPEKEVPSVIARHVSPYACQRKTTLNNYNKKITDALEIMAENYKFKENLQARLEARRAASVLKSLPFEVTSMKDIQGLPCITDDVRPVIEEIIEVGESSRVKEILNDERYKAFKQFTSVFGVGVKTAEKWYRMGLRTLEEAKASKSLKLNKMQKAGFLYYEDLASGVSKEEADAVLDIVKETVRTVSPDALVTIAGGFRRGKPQGHDVDLLITIPGRPTDPELLHKVVDLLKKQGLLLYGDIRERTFVEGQLPNPKPDQLDNHQKCFAILKLYRPKVDNSAVGTSKKVDMAEVKDWKAVRVDLVVAPDGQFAYALLGWTGSGMFRRDTRRYAEEERDMLLDNHGLYDLKKGIFLSADSEEEIFGHLDLDYLEPWERNA

SEQ ID NO: 6113 - DNA, 1182 bp, synthetic construct
  misc_feature 1..1182: note = Variant of terminal deoxynucleotidyl transferase
  source 1..1182: mol_type = other DNA
atgcaccatcatcaccatcacgggggctccggccatccggaaggtaataccccggagaaggaggtgccgagcgttatcgcccgtcatgttagtccgtacgcgtgccagcgcaagaccacgctgaataactacaacaaaaagatcaccgacgcgctggaaatcatggccgagaactacaagtttaaagagaacctgcaggcgcgcctggaggcccgtcgcgccgcgagtgtcctgaaaagcctgccgttcgaggttaccagcatgaaagacatccaaggtctgccgtgcattaccgacgacgtacgtcctgtgatcgaagagatcatcgaagtaggcgagagcagccgtgttaaagaaatcctcaatgacgagcgctacaaggcctttaagcagttcaccagcgtgttcggtgtgggcgtcaagaccgcggaaaagtggtaccgtatgggcctccgtacgctggaagaagcaaaggccagtaagagtctgaagctgaacaagatgcagaaggcgggcttcctgtactacgaggatctggcgagcggtgttagtaaagaagaagccgatgccgttctggatatcgtgaaggaaacggtgcgcactgttagtccggatgcgctggtgaccatcgccggcggtttccgccgtcataaacctcagggccacgacgttgacctgctgatcacgattccgggccgtcctacggatccggagctgctccacaaagtggttgatctgctcaagaagcaaggtctgctgctgtacggggacatccgtgagcgtacgttcgtggaggggcaactgccaaatcctaaacctgaccagctggacaaccatcagaagtgcttcgccattctcaagctgtaccgtccgaaggtggataacagtgcggttgggacgtcgaagaaagtcgacatggctgaggttaaggattggaaagcggttcgtgtggatctggtggtcgctccagatgagcagttcgcctatgcgctgctcggttggacgggcagcggcatgtttcgtcgcgatactcgtcgctacgcggaggaagagcgcgacatgctgctcgacaaccatggtctctacgacctgaaaaagggcatctttctgagtgcggacagcgaagaagagattttcggtcatctggacctggattatctggagccgtgggaacgcaacgcg

SEQ ID NO: 6114 - protein, 394 aa, synthetic construct
  REGION 1..394: note = Variant of terminal deoxynucleotidyl transferase
MHHHHHHGGSGHPEGNTPEKEVPSVIARHVSPYACQRKTTLNNYNKKITDALEIMAENYKFKENLQARLEARRAASVLKSLPFEVTSMKDIQGLPCITDDVRPVIEEIIEVGESSRVKEILNDERYKAFKQFTSVFGVGVKTAEKWYRMGLRTLEEAKASKSLKLNKMQKAGFLYYEDLASGVSKEEADAVLDIVKETVRTVSPDALVTIAGGFRRHKPQGHDVDLLITIPGRPTDPELLHKVVDLLKKQGLLLYGDIRERTFVEGQLPNPKPDQLDNHQKCFAILKLYRPKVDNSAVGTSKKVDMAEVKDWKAVRVDLVVAPDEQFAYALLGWTGSGMFRRDTRRYAEEERDMLLDNHGLYDLKKGIFLSADSEEEIFGHLDLDYLEPWERNA

SEQ ID NO: 6115 - DNA, 1182 bp, synthetic construct
  misc_feature 1..1182: note = Variant of terminal deoxynucleotidyl transferase
  source 1..1182: mol_type = other DNA
atgcaccatcatcaccatcacgggggctccggccatccggaaggtaataccccggagaaggaggtgccgagcgttatcgcccgtcatgttagtccgtacgcgtgccagcgcaagaccacgctgaataactacaacaaaaagatcaccgacgcgctggaaatcatggccgagaactacaagtttaaagagaacctgcaggcgcgcctggaggcccgtcgcgccgcgagtgtcctgaaaagcctgccgttcgaggttaccagcatgaaagacatccaaggtctgccgtgcattaccgacgacgtacgtcctgtgatcgaagagatcatcgaagtaggcgagagcagccgtgttaaagaaatcctcaatgacgagcgctacaaggcctttaagcagttcaccagcgtgttcggtgtgggcgtcaagaccgcggaaaagtggtaccgtatgggcctccgtacgctggaagaagcaaaggccagtaagagtctgaagctgaacaagatgcagaaggcgggcttcctgtactacgaggatctggcgagcggtgttagtaaagaagaagccgatgccgttctggatatcgtgaaggaaacggtgcgcactgttagtccggatgcgctggtgaccatcgccggcggtttccgccgtggcaaacctcagggccacgacgttgacctgctgatcacgattccgggccgtcctacggatccggagctgctccacaaagtggttgatctgctcaagaagcaaggtctgctgctgtacggggacatccgtgagcgtacgttcgtggaggggcaactgccaaatcctaaacctgaccagctggacaaccatcagaagtgcttcgccattctcaagctgtaccgtccgaaggtggataacagtgcggttgggacgtcgaagaaagtcgacatggctgaggttaaggattggaaagcggttcgtgtggatctggtggtcgctccagatgagcagttcgcctatgcgctgctcggttggacgggcagcggcatgtttcgtcgcgatactcgtcgctacgcggaggaagagcgcgacatgctgctcgacaaccatatgctctacgacctgaaaaagggcatctttctgagtgcggacagcgaagaagagattttcggtcatctggacctggattatctggagccgtgggaacgcaacgcg

SEQ ID NO: 6116 - protein, 394 aa, synthetic construct
  REGION 1..394: note = Variant of terminal deoxynucleotidyl transferase
MHHHHHHGGSGHPEGNTPEKEVPSVIARHVSPYACQRKTTLNNYNKKITDALEIMAENYKFKENLQARLEARRAASVLKSLPFEVTSMKDIQGLPCITDDVRPVIEEIIEVGESSRVKEILNDERYKAFKQFTSVFGVGVKTAEKWYRMGLRTLEEAKASKSLKLNKMQKAGFLYYEDLASGVSKEEADAVLDIVKETVRTVSPDALVTIAGGFRRGKPQGHDVDLLITIPGRPTDPELLHKVVDLLKKQGLLLYGDIRERTFVEGQLPNPKPDQLDNHQKCFAILKLYRPKVDNSAVGTSKKVDMAEVKDWKAVRVDLVVAPDEQFAYALLGWTGSGMFRRDTRRYAEEERDMLLDNHMLYDLKKGIFLSADSEEEIFGHLDLDYLEPWERNA

SEQ ID NO: 6117 - DNA, 1182 bp, synthetic construct
  misc_feature 1..1182: note = Variant of terminal deoxynucleotidyl transferase
  source 1..1182: mol_type = other DNA
atgcaccatcatcaccatcacgggggctccggccatccggaaggtaataccccggagaaggaggtgccgagcgttatcgcccgtcatgttagtccgtacgcgtgccagcgcaagaccacgctgaataactacaacaaaaagatcaccgacgcgctggaaatcatggccgagaactacaagtttaaagagaacctgcaggcgcgcctggaggcccgtcgcgccgcgagtgtcctgaaaagcctgccgttcgaggttaccagcatgaaagacatccaaggtctgccgtgcattaccgacgacgtacgtcctgtgatcgaagagatcatcgaagtaggcgagagcagccgtgttaaagaaatcctcaatgacgagcgctacaaggcctttaagcagttcaccagcgtgttcggtgtgggcgtcaagaccgcggaaaagtggtaccgtatgggcctccgtacgctggaagaagcaaaggccagtaagagtctgaagctgaacaagatgcagaaggcgggcttcctgtactacgaggatctggcgagcggtgttagtaaagaagaagccgatgccgttctggatatcgtgaaggaaacggtgcgcactgttagtccggatgcgctggtgaccatcgccggcggtttccgccgtggcaaacctcagggccacgacgttgacctgctgatcacgattccgggccgtcctacggatccggagctgctccacaaagtggttgatctgctcaagaagcaaggtctgctgctgtacggggacatccgtgagcgtacgttcgtggaggggcaactgccaaatcctaaacctgaccagctggacaaccatcagaagtgcttcgccattctcaagctgtaccgtccgaaggtggataacagtgcggttgggacgtcgaagaaagtcgacatggctgaggttaaggattggaaagcggttcgtgtggatctggtggtcgctccagatgagcagttcgcctatgcgctgctcggttggacgggcagcggcatgtttcgtcgcgatagtcgtcgctacgcggaggaagagcgcgacatgctgctcgacaaccatggtctctacgacctgaaaaagggcatctttctgagtgcggacagcgaagaagagattttcggtcatctggacctggattatctggagccgtgggaacgcaacgcg

SEQ ID NO: 6118 - protein, 394 aa, synthetic construct
  REGION 1..394: note = Variant of terminal deoxynucleotidyl transferase
MHHHHHHGGSGHPEGNTPEKEVPSVIARHVSPYACQRKTTLNNYNKKITDALEIMAENYKFKENLQARLEARRAASVLKSLPFEVTSMKDIQGLPCITDDVRPVIEEIIEVGESSRVKEILNDERYKAFKQFTSVFGVGVKTAEKWYRMGLRTLEEAKASKSLKLNKMQKAGFLYYEDLASGVSKEEADAVLDIVKETVRTVSPDALVTIAGGFRRGKPQGHDVDLLITIPGRPTDPELLHKVVDLLKKQGLLLYGDIRERTFVEGQLPNPKPDQLDNHQKCFAILKLYRPKVDNSAVGTSKKVDMAEVKDWKAVRVDLVVAPDEQFAYALLGWTGSGMFRRDSRRYAEEERDMLLDNHGLYDLKKGIFLSADSEEEIFGHLDLDYLEPWERNA

SEQ ID NO: 6119 - DNA, 1182 bp, synthetic construct
  misc_feature 1..1182: note = Variant of terminal deoxynucleotidyl transferase
  source 1..1182: mol_type = other DNA
atgcaccatcatcaccatcacgggggctccggccatccggaaggtaataccccggagaaggaggtgccgagcgttatcgcccgtcatgttagtccgtacgcgtgccagcgcaagaccacgctgaataactacaacaaaaagatcaccgacgcgctggaaatcatggccgagaactacaagtttaaagagaacctgcaggcgcgcctggaggcccgtcgcgccgcgagtgtcctgaaaagcctgccgttcgaggttaccagcatgaaagacatccaaggtctgccgtgcattaccgacgacgtacgtcctgtgatcgaagagatcatcgaagtaggcgagagcagccgtgttaaagaaatcctcaatgacgagcgctacaaggcctttaagcagttcaccagcgtgttcggtgtgggcgtcaagaccgcggaaaagtggtaccgtatgggcctccgtacgctggaagaagcaaaggccagtaagagtctgaagctgaacaagatgcagaaggcgggcttcctgtactacgaggatctggcgagcggtgttagtaaagaagaagccgatgccgttctggatatcgtgaaggaaacggtgcgcactgttagtccggatgcgctggtgaccatcgccggcggtttccgccgtggcaaacctcagggccacgacgttgacctgctgatcacgattccgggccgtcctacggatccggagctgctccacaaagtggttgatctgctcaagaagcaaggtctgctgctgtacggggacatccgtgagcgtacgttcgtggaggggcaactgccaaatcctaaacctgaccagctggacaaccatcagaagtgcttcgccattctcaagctgtaccgtccgaaggtggataacagtgcggttgggacgtcgaagaaagtcgacatggctgaggttaaggattggaaagcggttcgtgtggatctggtggtcgctccagatgagcagttcgcctatgcgctgctcggttggacgggcagcggcatgtttcgtcgcgatactcgtcgctacgcggaggaagagcgcgacatgctgctcgacaaccatggtctctacgacctgaaaaagggcatctttctgagtgcggactgggaagaagagattttcggtcatctggacctggattatctggagccgtgggaacgcaacgcg

SEQ ID NO: 6120 - protein, 394 aa, synthetic construct
  REGION 1..394: note = Variant of terminal deoxynucleotidyl transferase
MHHHHHHGGSGHPEGNTPEKEVPSVIARHVSPYACQRKTTLNNYNKKITDALEIMAENYKFKENLQARLEARRAASVLKSLPFEVTSMKDIQGLPCITDDVRPVIEEIIEVGESSRVKEILNDERYKAFKQFTSVFGVGVKTAEKWYRMGLRTLEEAKASKSLKLNKMQKAGFLYYEDLASGVSKEEADAVLDIVKETVRTVSPDALVTIAGGFRRGKPQGHDVDLLITIPGRPTDPELLHKVVDLLKKQGLLLYGDIRERTFVEGQLPNPKPDQLDNHQKCFAILKLYRPKVDNSAVGTSKKVDMAEVKDWKAVRVDLVVAPDEQFAYALLGWTGSGMFRRDTRRYAEEERDMLLDNHGLYDLKKGIFLSADWEEEIFGHLDLDYLEPWERNA

SEQ ID NO: 6121 - DNA, 1182 bp, synthetic construct
  misc_feature 1..1182: note = Variant of terminal deoxynucleotidyl transferase
  source 1..1182: mol_type = other DNA
atgcaccatcatcaccatcacgggggctccggccatccggaaggtaataccccggagaaggaggtgccgagcgttatcgcccgtcatgttagtccgtacgcgtgccagcgcaagaccacgctgaataactacaacaaaaagatcaccgacgcgctggaaatcatggccgagaactacaagtttaaagagaacctgcaggcgcgcctggaggcccgtcgcgccgcgagtgtcctgaaaagcctgccgttcgaggttaccagcatgaaagacatccaaggtctgccgtgcattaccgacgacgtacgtcctgtgatcgaagagatcatcgaagtaggcgagagcagccgtgttaaagaaatcctcaatgacgagcgctacaaggcctttaagcagttcaccagcgtgttcggtgtgggcgtcaagaccgcggaaaagtggtaccgtatgggcctccgtacgctggaagaagcaaaggccagtaagagtctgaagctgaacaagatgcagaaggcgggcttcctgtactacgaggatctggcgagcggtgttagtaaagaagaagccgatgccgttctggatatcgtgaaggaaacggtgcgcactgttagtccggatgcgctggtgaccatcgccggcggtttccgccgtggcaaacctcagggccacgacgttgacctgctgatcacgattccgggccgtcctacggatccggagctgctccacaaagtggttgatctgctcaagaagcaaggtctgctgctgtacggggacatccgtgagcgtacgttcgtggaggggcaactgccaaatcctaaacctgaccagctggacaaccatcagaagtgcttcgccattctcaagctgtaccgtccgaaggtggataacagtgcggttgggacgtcgaagaaagtcgacatggctgaggttaaggattggaaagcggttcgtgtggatctggtggtcgctccagatgagcagttcgcctatgcgctgctcggttggacgggcagcggcatgtttcgtcgcgatactcgtcgctacgcggaggaagagcgcgacatgctgctcgacaaccatggtctctacgacctgaaaaagggcatcaatctgagtgcggacagcgaagaagagattttcggtcatctggacctggattatctggagccgtgggaacgcaacgcg

SEQ ID NO: 6122 - protein, 394 aa, synthetic construct
  REGION 1..394: note = Variant of terminal deoxynucleotidyl transferase
MHHHHHHGGSGHPEGNTPEKEVPSVIARHVSPYACQRKTTLNNYNKKITDALEIMAENYKFKENLQARLEARRAASVLKSLPFEVTSMKDIQGLPCITDDVRPVIEEIIEVGESSRVKEILNDERYKAFKQFTSVFGVGVKTAEKWYRMGLRTLEEAKASKSLKLNKMQKAGFLYYEDLASGVSKEEADAVLDIVKETVRTVSPDALVTIAGGFRRGKPQGHDVDLLITIPGRPTDPELLHKVVDLLKKQGLLLYGDIRERTFVEGQLPNPKPDQLDNHQKCFAILKLYRPKVDNSAVGTSKKVDMAEVKDWKAVRVDLVVAPDEQFAYALLGWTGSGMFRRDTRRYAEEERDMLLDNHGLYDLKKGINLSADSEEEIFGHLDLDYLEPWERNA

SEQ ID NO: 6123 - DNA, 1182 bp, synthetic construct
  misc_feature 1..1182: note = Variant of terminal deoxynucleotidyl transferase
  source 1..1182: mol_type = other DNA
atgcaccatcatcaccatcacgggggctccggccatccggaaggtaataccccggagaaggaggtgccgagcgttatcgcccgtcatgttagtccgtacgcgtgccagcgcaagaccacgctgaataactacaacaaaaagatcaccgacgcgctggaaatcatggccgagaactacaagtttaaagagaacctgcaggcgcgcctggaggcccgtcgcgccgcgagtgtcctgaaaagcctgccgttcgaggttaccagcatgaaagacatccaaggtctgccgtgcattaccgacgacgtacgtcctgtgatcgaagagatcatcgaagtaggcgagagcagccgtgttaaagaaatcctcaatgacgagcgctacaaggcctttaagcagttcaccagcgtgttcggtgtgggcgtcaagaccgcggaaaagtggtaccgtatgggcctccgtacgctggaagaagcaaaggccagtaagagtctgaagctgaacaagatgcagaaggcgggcttcctgtactacgaggatctggcgagcggtgttagtaaagaagaagccgatgccgttctggatatcgtgaaggaaacggtgcgcactgttagtccggatgcgctggtgaccatcgccggcggtttccgccgtggcaaacctcagggccacgacgttgacctgctgatcacgattccgggccgtcctacggatccggagctgctccacaaagtggttgatctgctcaagaagcaaggtctgctgctgtacggggacatccgtgagcgtacgttcgtggaggggcaactgccaaatcctaaacctgaccagctggacaaccatcagaagtgcttcgccattctcaagctgtaccgtccgaaggtggataacagtgcggttgggacgtcgaagaaagtcgacatggctgaggttaaggattggaaagcggttcgtgtggatctggtggtcgctccagatgagcagttcgcctatgcgctgctcggttggacgggcagcggcatgtttcgtcgcgatactcgtcgctacgcggaggaagagcgcgacatgctgctcgacaaccatggtctctacgacctgaaaaagggcatctttctgagtgcggacagcgaagaagagattttcggtcatctggacctgctttatctggagccgtgggaacgcaacgcg

SEQ ID NO: 6124 - protein, 394 aa, synthetic construct
  REGION 1..394: note = Variant of terminal deoxynucleotidyl transferase
MHHHHHHGGSGHPEGNTPEKEVPSVIARHVSPYACQRKTTLNNYNKKITDALEIMAENYKFKENLQARLEARRAASVLKSLPFEVTSMKDIQGLPCITDDVRPVIEEIIEVGESSRVKEILNDERYKAFKQFTSVFGVGVKTAEKWYRMGLRTLEEAKASKSLKLNKMQKAGFLYYEDLASGVSKEEADAVLDIVKETVRTVSPDALVTIAGGFRRGKPQGHDVDLLITIPGRPTDPELLHKVVDLLKKQGLLLYGDIRERTFVEGQLPNPKPDQLDNHQKCFAILKLYRPKVDNSAVGTSKKVDMAEVKDWKAVRVDLVVAPDEQFAYALLGWTGSGMFRRDTRRYAEEERDMLLDNHGLYDLKKGIFLSADSEEEIFGHLDLLYLEPWERNA

SEQ ID NO: 6125 - DNA, 1182 bp, synthetic construct
  misc_feature 1..1182: note = Variant of terminal deoxynucleotidyl transferase
  source 1..1182: mol_type = other DNA
atgcaccatcatcaccatcacgggggctccggccatccggaaggtaataccccggagaaggaggtgccgagcgttatcgcccgtcatgttagtccgtacgcgtgccagcgcaagaccacgctgaataactacaacaaaaagatcaccgacgcgctggaaatcatggccgagaactacaagtttaaagagaacctgcaggcgcgcctggaggcccgtcgcgccgcgagtgtcctgaaaagcctgccgttcgaggttaccagcatgaaagacatccaaggtctgccgtgcattaccgacgacgtacgtcctgtgatcgaagagatcatcgaagtaggcgagagcagccgtgttaaagaaatcctcaatgacgagcgctacaaggcctttaagcagttcaccagcgtgttcggtgtgggcgtcaagaccgcggaaaagtggtaccgtatgggcctccgtacgctggaagaagcaaaggccagtaagagtctgaagctgaacaagatgcagaaggcgggcttcctgtactacgaggatctggcgagcggtgttagtaaagaagaagccgatgccgttctggatatcgtgaaggaaacggtgcgcactgttagtccggatgcgctggtgaccatcgccggcggtttccgccgtggcaaacctcagggccacgacgttgacctgctgatcacgattccgggccgtcctacggatccggagctgctccacaaagtggttgatctgctcaagaagcaaggtctgctgctgtacggggacatccgtgagcgtacgttcgtggaggggcaactgccaaatcctaaacctgaccagctggacaaccatcagaagtgcttcgccattctcaagctgtaccgtccgaaggtggataacagtgcggttgggacgtcgaagaaagtcgacatggctgaggttaaggattggaaagcggttcgtgtggatctggtggtcgctccagatgagcagttcgcctatgcgctgctcggttggacgggcagcggcatgtttcgtcgcgatactcgtcgctacgcggaggaagagcgcgacattctgctcgacaaccatggtctctacgacctgaaaaagggcatctttctgagtgcggacagcgaagaagagattttcggtcatctggacctggattatctggagccgtgggaacgcaacgcg

SEQ ID NO: 6126 - protein, 394 aa, synthetic construct
  REGION 1..394: note = Variant of terminal deoxynucleotidyl transferase
MHHHHHHGGSGHPEGNTPEKEVPSVIARHVSPYACQRKTTLNNYNKKITDALEIMAENYKFKENLQARLEARRAASVLKSLPFEVTSMKDIQGLPCITDDVRPVIEEIIEVGESSRVKEILNDERYKAFKQFTSVFGVGVKTAEKWYRMGLRTLEEAKASKSLKLNKMQKAGFLYYEDLASGVSKEEADAVLDIVKETVRTVSPDALVTIAGGFRRGKPQGHDVDLLITIPGRPTDPELLHKVVDLLKKQGLLLYGDIRERTFVEGQLPNPKPDQLDNHQKCFAILKLYRPKVDNSAVGTSKKVDMAEVKDWKAVRVDLVVAPDEQFAYALLGWTGSGMFRRDTRRYAEEERDILLDNHGLYDLKKGIFLSADSEEEIFGHLDLDYLEPWERNA

SEQ ID NO: 6127 - DNA, 1182 bp, synthetic construct
  misc_feature 1..1182: note = Variant of terminal deoxynucleotidyl transferase
  source 1..1182: mol_type = other DNA
atgcaccatcatcaccatcacgggggctccggccatccggaaggtaataccccggagaaggaggtgccgagcgttatcgcccgtcatgttagtccgtacgcgtgccagcgcaagaccacgctgaataactacaacaaaaagatcaccgacgcgctggagatcatggccgagaactacaagtttaaagagaacctgcaggcgcgcctggaggcccgtcgcgccgcgagtgtcctgaaaagcctgccgttcgaggttaccagcatgaaagacatccaaggtctgccgtgcattaccgacgacgtacgtcctgtgatcgaagagatcatcgaagtaggcgagagcagccgtgttaaagaaatcctcaatgacgagcgctacaaggcctttaagcagttcaccagcgtgttcggtgtgggcgtcaagaccgcggaaaagtggtaccgtatgggcctccgtacgctggaagaagtaaaggccagtaagttcctgaagctgaacaagatgcagaaggcgggcttcctgtactacgaggatctggcgagcggtgttacgaaagaagaagcggatgccgttctggatatcgtgaaggaaacggtgtggactgtttcgccggatgctctggtgaccatcgccggcggtttccgccgtggcaaacctcagggccacgacgttgacctgctgatcacgattccgggccgtcctacggatccggagctgctccacaaggtggttgatctgctcaagaagcaaggtctgctgctgtacggggacatccgtgagcgtacgttcgtggaggggcaactgccaaatcctaaacctgaccagctggacaatcatcagaagtgcttcgccattctcaagctgtaccgcccgaaggtggataacagtgcggttgggacgtcgaagaaagtcgacatggctgaggttaaggattggaaagcggttcgtgtggatctggtggtcgctccagatgagcagttcgcctatgcgaaactcggttggacgggcagcggcatgtttcgtcgcgatactcgtcgctacgcggaggaagagcgcgacatgctgctcgacaaccatggtctctacgacctgaaaaagggcatttttctgagtgcggacagcgaagaagagattttcggtcatctggacctggattatctggagccgtgggaacgcaacgcg

SEQ ID NO: 6128 - protein, 394 aa, synthetic construct
  REGION 1..394: note = Variant of terminal deoxynucleotidyl transferase
MHHHHHHGGSGHPEGNTPEKEVPSVIARHVSPYACQRKTTLNNYNKKITDALEIMAENYKFKENLQARLEARRAASVLKSLPFEVTSMKDIQGLPCITDDVRPVIEEIIEVGESSRVKEILNDERYKAFKQFTSVFGVGVKTAEKWYRMGLRTLEEVKASKFLKLNKMQKAGFLYYEDLASGVTKEEADAVLDIVKETVWTVSPDALVTIAGGFRRGKPQGHDVDLLITIPGRPTDPELLHKVVDLLKKQGLLLYGDIRERTFVEGQLPNPKPDQLDNHQKCFAILKLYRPKVDNSAVGTSKKVDMAEVKDWKAVRVDLVVAPDEQFAYAKLGWTGSGMFRRDTRRYAEEERDMLLDNHGLYDLKKGIFLSADSEEEIFGHLDLDYLEPWERNA

SEQ ID NO: 6129 - DNA, 1182 bp, synthetic construct
  misc_feature 1..1182: note = Variant of terminal deoxynucleotidyl transferase
  source 1..1182: mol_type = other DNA
atgcaccatcatcaccatcacgggggctccggccatccggaaggtaataccccggagaaggaggtgccgagcgttatcgcccgtcatgttagtccgtacgcgtgccagcgcaagaccacgctgaataactacaacaaaaagatcaccgacgcgctggagatcatggccgagaactacaagtttaaagagaacctgcaggcgcgcctggaggcccgtcgcgccgcgagtgtcctgaaaagcctgccgttcgaggttaccagcatgaaagacatccaaggtctgccgtgcattaccgacgacgtacgtcctgtgatcgaagagatcatcgaagtaggcgagagcagccgtgttaaagaaatcctcaatgacgagcgctacaaggcctttaagcagttcaccagcgtgttcggtgtgggcgtcaagaccgcggaaaagtggtaccgtatgggcctccgtacgctggaagaagtaaaggccagtaagttcctgaagctgaacaagatgcagaaggcgggcttcctgtactacgaggatctggcgagcggtgtttcgaaagaagaagcggatgccgttctggatatcgtgaaggaaacggtgcgcactgttagtccggatccgctggtgaccatcgcaggcggtttccgccgtggcaaacctcagggccacgacgttgacctgctgatcacgattccgggccgtcctacggatccggagctgctccacaaagtggttgatctgctcaagaagcaaggtctgctgctgtacggggacatccgtgagcgtacgttcgtggaggggcaactgccaaatcctaaacctgaccagctggacaatcatcagaagtgcttcgccattctcaagctgtacaatccgaaggtggataacagtgcggttgggacgtcgaagaaagtcgacatggctgaggttaaggattggaaagcggttcgtgtggatctggtggtcgctccagatgagcagttcgcctatgcgaaactcggttggacgggcagcggcatgtttcgtcgcgatactcgtcgctacgcggaggaagagcgcgacatgctgctcgacaaccatggtctctacgacctgaaaaagggcatttttctgagtgcggacagcgaagaagagattttcggtcatctggacctggattatctggagccgtgggaacgcaacgcg

SEQ ID NO: 6130 - protein, 394 aa, synthetic construct
  REGION 1..394: note = Variant of terminal deoxynucleotidyl transferase
MHHHHHHGGSGHPEGNTPEKEVPSVIARHVSPYACQRKTTLNNYNKKITDALEIMAENYKFKENLQARLEARRAASVLKSLPFEVTSMKDIQGLPCITDDVRPVIEEIIEVGESSRVKEILNDERYKAFKQFTSVFGVGVKTAEKWYRMGLRTLEEVKASKFLKLNKMQKAGFLYYEDLASGVSKEEADAVLDIVKETVRTVSPDPLVTIAGGFRRGKPQGHDVDLLITIPGRPTDPELLHKVVDLLKKQGLLLYGDIRERTFVEGQLPNPKPDQLDNHQKCFAILKLYNPKVDNSAVGTSKKVDMAEVKDWKAVRVDLVVAPDEQFAYAKLGWTGSGMFRRDTRRYAEEERDMLLDNHGLYDLKKGIFLSADSEEEIFGHLDLDYLEPWERNA

SEQ ID NO: 6131 - DNA, 1182 bp, synthetic construct
  misc_feature 1..1182: note = Variant of terminal deoxynucleotidyl transferase
  source 1..1182: mol_type = other DNA
atgcaccatcatcaccatcacgggggctccggccatccggaaggtaataccccggagaaggaggtgccgagcgttatcgcccgtcatgttagtccgtacgcgtgccagcgcaagaccacgctgaataactacaacaaaaagatcaccgacgcgctggagatcatggccgagaactacaagtttaaagagaacctgcaggcgcgcctggaggcccgtcgcgccgcgagtgtcctgaaaagcctgccgttcgaggttaccagcatgaaagacatccaaggtctgccgtgcattaccgacgacgtacgtcctgtgatcgaagagatcatcgaagtaggcgagagcagccgtgttaaagaaatcctcaatgacgagcgctacaaggcctttaagcagttcaccagcgtgttcggtgtgggcgtcaagaccgcggaaaagtggtaccgtatgggcctccgtacgctggaagaagtaaaggccagtaagttcctgaagctgaacaagatgcagaaggcgggcttcctgtactacgaggatctggcgagcggtgtttcgaaagaagaaaaagatgccgttctggatatcgtgaaggaaacggtgcgcactgttagtccggatgcgctggtgaccatcgtgggcggtttccgccgtggcaaacctcagggccacgacgttgacctgctgatcacgattccgggccgtcctacggatccggagctgctccacaaagtggttgatctgctcaagaagcaaggtctgctgctgtacggggacatccgtgagcgtacgttcgtggaggggcaactgccaaatcctaaacctgaccagctggacaatcatcagaagtgcttcgccattctcaagctgtaccgcccgaaggtggataacagtgcggttgggacgtcgaagaaagtcgacatggctgaggttaaggattggaaagcggttcgtgtggatctggtggtcgctccagatgagcagttcgcctatgcgaaactcggttggacgggcagcggcatgtttcgtcgcgatactcgtcgctacgcggaggaagagcgcgacatgctgctcgacaaccatggtctctacgacctgaaaaagggcatctttctgagtgcggacagcgaagaagagattttcggtcatctggacctggattatctggagccgtgggaacgcaacgcg

SEQ ID NO: 6132 - protein, 394 aa, synthetic construct
  REGION 1..394: note = Variant of terminal deoxynucleotidyl transferase
MHHHHHHGGSGHPEGNTPEKEVPSVIARHVSPYACQRKTTLNNYNKKITDALEIMAENYKFKENLQARLEARRAASVLKSLPFEVTSMKDIQGLPCITDDVRPVIEEIIEVGESSRVKEILNDERYKAFKQFTSVFGVGVKTAEKWYRMGLRTLEEVKASKFLKLNKMQKAGFLYYEDLASGVSKEEKDAVLDIVKETVRTVSPDALVTIVGGFRRGKPQGHDVDLLITIPGRPTDPELLHKVVDLLKKQGLLLYGDIRERTFVEGQLPNPKPDQLDNHQKCFAILKLYRPKVDNSAVGTSKKVDMAEVKDWKAVRVDLVVAPDEQFAYAKLGWTGSGMFRRDTRRYAEEERDMLLDNHGLYDLKKGIFLSADSEEEIFGHLDLDYLEPWERNA

SEQ ID NO: 6133 - DNA, 1182 bp, synthetic construct
  misc_feature 1..1182: note = Variant of terminal deoxynucleotidyl transferase
  source 1..1182: mol_type = other DNA
atgcaccatcatcaccatcacgggggctccggccatccggaaggtaataccccggagaaggaggtgccgagcgttatcgcccgtcatgttagtccgtacgcgtgccagcgcaagaccacgctgaataactacaacaaaaagatcaccgacgcgctggagatcatggccgagaactacaagtttaaagagaacctgcaggcgcgcctggaggcccgtcgcgccgcgagtgtcctgaaaagcctgccgttcgaggttaccagcatgaaagacatccaaggtctgccgtgcattaccgacgacgtacgtcctgtgatcgaagagatcatcgaagtaggcgagagcagccgtgttaaagaaatcctcaatgacgagcgctacaaggcctttaagcagttcaccagcgtgttcggtgtgggcgtcaagaccgcggaaaagtggtaccgtatgggcctccgtacgctggaagaagtaaaggccagtaagttcctgaagctgaacaagatgcagaaggcgggcttcctgtactacgaggatctggcgagcggtgtttcgaaagaagaagcggatgccgttctggatatcgtgaaggaaacggtgcgtactgttgatccggatgctctggtgaccatcgccggcggtttccgccgtggcaaacctcagggccacgacgttgacctgctgatcacgattccgggccgtcctacggatccggagctgctccacaacgtggttgatctgctcaagaagcaaggtctgctgctgtacggggacatccgtgagcgtacgttcgtggaggggcaactgccaaatcctaaacctgaccagctggacaatcatcagaagtgcttcgccattctcaagctgtacaatccgaaggtggataacagttttgttgggacgtcgaagaaagtcgacatggctgaggttaaggattggaaagcggttcgtgtggatctggtggtcgctccagatgagcagttcgcctatgcgaaactcggttggacgggcagcggcatgtttcgtcgcgatactcgtcgctacgcggaggaagagcgcgacatgctgctcgacaaccatggtctctacgacctgaaaaagggcacttttctgagtgcggacagcgaagaagagattttcggtcatctggacctggattatctggagccgtgggaacgcaacgcg

SEQ ID NO: 6134 - protein, 394 aa, synthetic construct
  REGION 1..394: note = Variant of terminal deoxynucleotidyl transferase
MHHHHHHGGSGHPEGNTPEKEVPSVIARHVSPYACQRKTTLNNYNKKITDALEIMAENYKFKENLQARLEARRAASVLKSLPFEVTSMKDIQGLPCITDDVRPVIEEIIEVGESSRVKEILNDERYKAFKQFTSVFGVGVKTAEKWYRMGLRTLEEVKASKFLKLNKMQKAGFLYYEDLASGVSKEEADAVLDIVKETVRTVDPDALVTIAGGFRRGKPQGHDVDLLITIPGRPTDPELLHNVVDLLKKQGLLLYGDIRERTFVEGQLPNPKPDQLDNHQKCFAILKLYNPKVDNSFVGTSKKVDMAEVKDWKAVRVDLVVAPDEQFAYAKLGWTGSGMFRRDTRRYAEEERDMLLDNHGLYDLKKGTFLSADSEEEIFGHLDLDYLEPWERNA

SEQ ID NO: 6135 - DNA, 1182 bp, synthetic construct
  misc_feature 1..1182: note = Variant of terminal deoxynucleotidyl transferase
  source 1..1182: mol_type = other DNA
atgcaccatcatcaccatcacgggggctccggccatccggaaggtaataccccggagaaggaggtgccgagcgttatcgcccgtcatgttagtccgtacgcgtgccagcgcaagaccacgctgaataactacaacaaaaagatcaccgacgcgctggaaatcatggccgagaactacaagtttaaagagaacctgcaggcgcgcctggaggcccgtcgcgccgcgagtgtcctgaaaagcctgccgttcgaggttaccagcatgaaagacatccaaggtctgccgtgcattaccgacgacgtacgtcctgtgatcgaagagatcatcgaagtaggcgagagcagccgtgttaaagaaatcctcaatgacgagcgctacaaggcctttaagcagttcaccagcgtgttcggtgtgggcgtcaagaccgcggaaaagtggtaccgtatgggcctccgtacgctggaagaagtaaaggccagtaagttcctgaagctgaacaagatgcagaaggcgggcttcctgtactacgaggatctggcgagcggtgttagtaaagaagaagccgatgccgttctggatatcgtgaaggaaacggtgcgcactgttagtccggatgcgctggtgaccatcgccggcggtttccgccgtggcaaacctcagggccacgacgttgacctgctgatcacgattccgggccgtcctacggatccggagctgctccacaaagtggttgatctgctcaagaagcaaggtctgctgctgtacggggacatccgtgagcgtacgttcgtggaggggcaactgccaaatcctaaacctgaccagctggacaatcatcagaagtgcttcgccattctcaagctgtaccgtccgaaggtggataacagtgcggttgggacgtcgaagaaagtcgacatggctgaggttaaggattggaaagcggttcgtgtggatctggtggtcgctccagatgagcagttcgcctatgcgaaactcggttggacgggcagcggcatgtttcgtcgcgatactcgtcgctacgcggaggaagagcgcgacatgctgctcgacaaccatggtctctacgacctgaaaaagggcacttttctgagtgcggacagcgaagaagagattttcggtcatctggacctggattatctggagccgtgggaacgcaacgcg

SEQ ID NO: 6136 - protein, 394 aa, synthetic construct
  REGION 1..394: note = Variant of terminal deoxynucleotidyl transferase
MHHHHHHGGSGHPEGNTPEKEVPSVIARHVSPYACQRKTTLNNYNKKITDALEIMAENYKFKENLQARLEARRAASVLKSLPFEVTSMKDIQGLPCITDDVRPVIEEIIEVGESSRVKEILNDERYKAFKQFTSVFGVGVKTAEKWYRMGLRTLEEVKASKFLKLNKMQKAGFLYYEDLASGVSKEEADAVLDIVKETVRTVSPDALVTIAGGFRRGKPQGHDVDLLITIPGRPTDPELLHKVVDLLKKQGLLLYGDIRERTFVEGQLPNPKPDQLDNHQKCFAILKLYRPKVDNSAVGTSKKVDMAEVKDWKAVRVDLVVAPDEQFAYAKLGWTGSGMFRRDTRRYAEEERDMLLDNHGLYDLKKGTFLSADSEEEIFGHLDLDYLEPWERNA

SEQ ID NO: 6137 - DNA, 1182 bp, synthetic construct
  misc_feature 1..1182: note = Variant of terminal deoxynucleotidyl transferase
  source 1..1182: mol_type = other DNA
atgcaccatcatcaccatcacgggggctccggccatccggaaggtaataccccggagaaggaggtgccgagcgttatcgcccgtcatgttagtccgtacgcgtgccagcgcaagaccacgctgaataactacaacaaaaagatcaccgacgcgctggagatcatggccgagaactacaagtttaaagagaacctgcaggcgcgcctggaggcccgtcgcgccgcgagtgtcctgaaaagcctgccgttcgaggttaccagcatgaaagacatccaaggtctgccgtgcattaccgacgacgtacgtcctgtgatcgaagagatcatcgaagtaggcgagagcagccgtgttaaagaaatcctcaatgacgagcgctacaaggcctttaagcagttcaccagcgtgttcggtgtgggcgtcaagaccgcggaaaagtggtaccgtatgggcctccgtacgctggaagaagtaaaggccagtaagttcctgaagctgaacaagatgcagaaggcgggcttcctgtactacgaggatctggcgagcggtgtttcgaaagaagaagcggatgccgttctggatatcgtgaaggaaacggtgtggactgttgatccggatgctctggtgaccatcgccggcggtttccgccgtggcaaacctcagggccacgacgttgacctgctgatcacgattccgggccgtcctacggatccggagctgctccacaaggtggttgatctgctcaagaagcaaggtctgctgctgtacggggacatccgtgagcgtacgttcgtggaggggcaactgccaaatcctaaacctgaccagctggacaatcatcagaagtgcttcgccattctcaagctgtacaatccgaaggtggataacagtgcggttgggacgtcgaagaaagtcgacatggctgaggttaaggattggaaagcggttcgtgtggatctggtggtcgctccagatgagcagttcgcctatgcgaaactcggttggacgggcagcggcatgtttcgtcgcgatactcgtcgctacgcggaggaagagcgcgacatgctgctcgacaaccatggtctctacgacctgaaaaagggcacttttctgagtgcggacagcgaagaagagattttcggtcatctggacctggattatctggagccgtgggaacgcaacgcg

SEQ ID NO: 6138 - protein, 394 aa, synthetic construct
  REGION 1..394: note = Variant of terminal deoxynucleotidyl transferase
MHHHHHHGGSGHPEGNTPEKEVPSVIARHVSPYACQRKTTLNNYNKKITDALEIMAENYKFKENLQARLEARRAASVLKSLPFEVTSMKDIQGLPCITDDVRPVIEEIIEVGESSRVKEILNDERYKAFKQFTSVFGVGVKTAEKWYRMGLRTLEEVKASKFLKLNKMQKAGFLYYEDLASGVSKEEADAVLDIVKETVWTVDPDALVTIAGGFRRGKPQGHDVDLLITIPGRPTDPELLHKVVDLLKKQGLLLYGDIRERTFVEGQLPNPKPDQLDNHQKCFAILKLYNPKVDNSAVGTSKKVDMAEVKDWKAVRVDLVVAPDEQFAYAKLGWTGSGMFRRDTRRYAEEERDMLLDNHGLYDLKKGTFLSADSEEEIFGHLDLDYLEPWERNA

SEQ ID NO: 6139 - DNA, 1182 bp, synthetic construct
  misc_feature 1..1182: note = Variant of terminal deoxynucleotidyl transferase
  source 1..1182: mol_type = other DNA
atgcaccatcatcaccatcacgggggctccggccatccggaaggtaataccccggagaaggaggtgccgagcgttatcgcccgtcatgttagtccgtacgcgtgccagcgcaagaccacgctgaataactacaacaaaaagatcaccgacgcgctggagatcatggccgagaactacaagtttaaagagaacctgcaggcgcgcctggaggcccgtcgcgccgcgagtgtcctgaaaagcctgccgttcgaggttaccagcatgaaagacatccaaggtctgccgtgcattaccgacgacgtacgtcctgtgatcgaagagatcatcgaagtaggcgagagcagccgtgttaaagaaatcctcaatgacgagcgctacaaggcctttaagcagttcaccagcgtgttcggtgtgggcgtcaagaccgcggaaaagtggtaccgtatgggcctccgtacgctggaagaagtaaaggccagtaagttcctgaagctgaacaagatgcagaaggcgggcttcctgtactacgaggatctggcgagcggtgttacgaaagaagaaaaagatgccgttctggatatcgtgaaggaaacggtgcgcactgttagtccggatgcgctggtgaccatcgtgggcggtttccgccgtggcaaacctcagggccacgacgttgacctgctgatcacgattccgggccgtcctacggatccggagctgctccacaacgtggttgatctgctcaagaagcaaggtctgctgctgtacggggacatccgtgagcgtacgttcgtggaggggcaactgccaaatcctaaacctgaccagctggacaatcatcagaagtgcttcgccattctcaagctgtacaatccgaaggtggataacagtgcggttgggacgtcgaagaaagtcgacatggctgaggttaaggattggaaagcggttcgtgtggatctggtggtcgctccagatgagcagttcgcctatgcgaaactcggttggacgggcagcggcatgtttcgtcgcgatactcgtcgctacgcggaggaagagcgcgacatgctgctcgacaaccatggtctctacgacctgaaaaagggcacttttctgagtgcggacagcgaagaagagattttcggtcatctggacctggattatctggagccgtgggaacgcaacgcg

SEQ ID NO: 6140 - protein, 394 aa, synthetic construct
  REGION 1..394: note = Variant of terminal deoxynucleotidyl transferase
MHHHHHHGGSGHPEGNTPEKEVPSVIARHVSPYACQRKTTLNNYNKKITDALEIMAENYKFKENLQARLEARRAASVLKSLPFEVTSMKDIQGLPCITDDVRPVIEEIIEVGESSRVKEILNDERYKAFKQFTSVFGVGVKTAEKWYRMGLRTLEEVKASKFLKLNKMQKAGFLYYEDLASGVTKEEKDAVLDIVKETVRTVSPDALVTIVGGFRRGKPQGHDVDLLITIPGRPTDPELLHNVVDLLKKQGLLLYGDIRERTFVEGQLPNPKPDQLDNHQKCFAILKLYNPKVDNSAVGTSKKVDMAEVKDWKAVRVDLVVAPDEQFAYAKLGWTGSGMFRRDTRRYAEEERDMLLDNHGLYDLKKGTFLSADSEEEIFGHLDLDYLEPWERNA

SEQ ID NO: 6141 - DNA, 1182 bp, synthetic construct
  misc_feature 1..1182: note = Variant of terminal deoxynucleotidyl transferase
  source 1..1182: mol_type = other DNA
atgcaccatcatcaccatcacgggggctccggccatccggaaggtaataccccggagaaggaggtgccgagcgttatcgcccgtcatgttagtccgtacgcgtgccagcgcaagaccacgctgaataactacaacaaaaagatcaccgacgcgctggagatcatggccgagaactacaagtttaaagagaacctgcaggcgcgcctggaggcccgtcgcgccgcgagtgtcctgaaaagcctgccgttcgaggttaccagcatgaaagacatccaaggtctgccgtgcattaccgacgacgtacgtcctgtgatcgaagagatcatcgaagtaggcgagagcagccgtgttaaagaaatcctcaatgacgagcgctacaaggcctttaagcagttcaccagcgtgttcggtgtgggcgtcaagaccgcggaaaagtggtaccgtatgggcctccgtacgctggaagaagtaaaggccagtaagttcctgaagctgaacaagatgcagaaggcgggcttcctgtactacgaggatctggcgagcggtgttacgaaagaagaaaaagatgccgttctggatatcgtgaaggaaacggtgcgtactgttgatccggatgctctggtgaccatcgccggcggtttccgccgtggcaaacctcagggccacgacgttgacctgctgatcacgattccgggccgtcctacggatccggagctgctccacaaagtggttgatctgctcaagaagcaaggtctgctgctgtacggggacatccgtgagcgtacgttcgtggaggggcaactgccaaatcctaaacctgaccagctggacaatcatcagaagtgcttcgccattctcaagctgtacaatccgaaggtggataacagttttgttgggacgtcgaagaaagtcgacatggctgaggttaaggattggaaagcggttcgtgtggatctggtggtcgctccagatgagcagttcgcctatgcgaaactcggttggacgggcagcggcatgtttcgtcgcgatactcgtcgctacgcggaggaagagcgcgacatgctgctcgacaaccatggtctctacgacctgaaaaagggcatttttctgagtgcggacagcgaagaagagattttcggtcatctggacctggattatctggagccgtgggaacgcaacgcg

SEQ ID NO: 6142 - protein, 394 aa, synthetic construct
  REGION 1..394: note = Variant of terminal deoxynucleotidyl transferase
MHHHHHHGGSGHPEGNTPEKEVPSVIARHVSPYACQRKTTLNNYNKKITDALEIMAENYKFKENLQARLEARRAASVLKSLPFEVTSMKDIQGLPCITDDVRPVIEEIIEVGESSRVKEILNDERYKAFKQFTSVFGVGVKTAEKWYRMGLRTLEEVKASKFLKLNKMQKAGFLYYEDLASGVTKEEKDAVLDIVKETVRTVDPDALVTIAGGFRRGKPQGHDVDLLITIPGRPTDPELLHKVVDLLKKQGLLLYGDIRERTFVEGQLPNPKPDQLDNHQKCFAILKLYNPKVDNSFVGTSKKVDMAEVKDWKAVRVDLVVAPDEQFAYAKLGWTGSGMFRRDTRRYAEEERDMLLDNHGLYDLKKGIFLSADSEEEIFGHLDLDYLEPWERNA

SEQ ID NO: 6143 - DNA, 1182 bp, synthetic construct
  misc_feature 1..1182: note = Variant of terminal deoxynucleotidyl transferase
  source 1..1182: mol_type = other DNA
atgcaccatcatcaccatcacgggggctccggccatccggaaggtaataccccggagaaggaggtgccgagcgttatcgcccgtcatgttagtccgtacgcgtgccagcgcaagaccacgctgaataactacaacaaaaagatcaccgacgcgctggagatcatggccgagaactacaagtttaaagagaacctgcaggcgcgcctggaggcccgtcgcgccgcgagtgtcctgaaaagcctgccgttcgaggttaccagcatgaaagacatccaaggtctgccgtgcattaccgacgacgtacgtcctgtgatcgaagagatcatcgaagtaggcgagagcagccgtgttaaagaaatcctcaatgacgagcgctacaaggcctttaagcagttcaccagcgtgttcggtgtgggcgtcaagaccgcggaaaagtggtaccgtatgggcctccgtacgctggaagaagtaaaggccagtaagttcctgaagctgaacaagatgcagaaggcgggcttcctgtactacgaggatctggcgagcggtgtttcgaaagaagaagcggatgccgttctggatatcgtgaaggaaacggtgcgtactgttgatccggatgctctggtgaccatcgcaggcggtttccgccgtggcaaacctcagggccacgacgttgacctgctgatcacgattccgggccgtcctacggatccggagctgctccacaaagtggttgatctgctcaagaagcaaggtctgctgctgtacggggacatccgtgagcgtacgttcgtggaggggcaactgccaaatcctaaacctgaccagctggacaatcatcagaagtgcttcgccattctcaagctgtaccgcccgaaggtggataacagttttgttgggacgtcgaagaaagtcgacatggctgaggttaaggattggaaagcggttcgtgtggatctggtggtcgctccagatgagcagttcgcctatgcgaaactcggttggacgggcagcggcatgtttcgtcgcgatactcgtcgctacgcggaggaagagcgcgacatgctgctcgacaaccatggtctctacgacctgaaaaagggcatttttctgagtgcggacagcgaagaagagattttcggtcatctggacctggattatctggagccgtgggaacgcaacgcg

SEQ ID NO: 6144 - protein, 394 aa, synthetic construct
  REGION 1..394: note = Variant of terminal deoxynucleotidyl transferase
MHHHHHHGGSGHPEGNTPEKEVPSVIARHVSPYACQRKTTLNNYNKKITDALEIMAENYKFKENLQARLEARRAASVLKSLPFEVTSMKDIQGLPCITDDVRPVIEEIIEVGESSRVKEILNDERYKAFKQFTSVFGVGVKTAEKWYRMGLRTLEEVKASKFLKLNKMQKAGFLYYEDLASGVSKEEADAVLDIVKETVRTVDPDALVTIAGGFRRGKPQGHDVDLLITIPGRPTDPELLHKVVDLLKKQGLLLYGDIRERTFVEGQLPNPKPDQLDNHQKCFAILKLYRPKVDNSFVGTSKKVDMAEVKDWKAVRVDLVVAPDEQFAYAKLGWTGSGMFRRDTRRYAEEERDMLLDNHGLYDLKKGIFLSADSEEEIFGHLDLDYLEPWERNA

SEQ ID NO: 6145 - DNA, 1182 bp, synthetic construct
  misc_feature 1..1182: note = Variant of terminal deoxynucleotidyl transferase
  source 1..1182: mol_type = other DNA
atgcaccatcatcaccatcacgggggctccggccatccggaaggtaataccccggagaaggaggtgccgagcgttatcgcccgtcatgttagtccgtacgcgtgccagcgcaagaccacgctgaataactacaacaaaaagatcaccgacgcgctggagatcatggccgagaactacaagtttaaagagaacctgcaggcgcgcctggaggcccgtcgcgccgcgagtgtcctgaaaagcctgccgttcgaggttaccagcatgaaagacatccaaggtctgccgtgcattaccgacgacgtacgtcctgtgatcgaagagatcatcgaagtaggcgagagcagccgtgttaaagaaatcctcaatgacgagcgctacaaggcctttaagcagttcaccagcgtgttcggtgtgggcgtcaagaccgcggaaaagtggtaccgtatgggcctccgtacgctggaagaagtaaaggccagtaagttcctgaagctgaacaagatgcagaaggcgggcttcctgtactacgaggatctggcgagcggtgttacgaaagaagaagcggatgccgttctggatatcgtgaaggaaacggtgcgcactgttagtccggatgcgctggtgaccatcgccggcggtttccgccgtggcaaacctcagggccacgacgttgacctgctgatcacgattccgggccgtcctacggatccggagctgctccacaacgtggttgatctgctcaagaagcaaggtctgctgctgtacggggacatccgtgagcgtacgttcgtggaggggcaactgccaaatcctaaacctgaccagctggacaatcatcagaagtgcttcgccattctcaagctgtaccgtccgaaggtggataacagtgcggttgggacgtcgaagaaagtcgacatggctgaggttaaggattggaaagcggttcgtgtggatctggtggtcgctccagatgagcagttcgcctatgcgaaactcggttggacgggcagcggcatgtttcgtcgcgatactcgtcgctacgcggaggaagagcgcgacatgctgctcgacaaccatggtctctacgacctgaaaaagggcatttttctgagtgcggacagcgaagaagagattttcggtcatctggacctggattatctggagccgtgggaacgcaacgcg

SEQ ID NO: 6146 - protein, 394 aa, synthetic construct
  REGION 1..394: note = Variant of terminal deoxynucleotidyl transferase
MHHHHHHGGSGHPEGNTPEKEVPSVIARHVSPYACQRKTTLNNYNKKITDALEIMAENYKFKENLQARLEARRAASVLKSLPFEVTSMKDIQGLPCITDDVRPVIEEIIEVGESSRVKEILNDERYKAFKQFTSVFGVGVKTAEKWYRMGLRTLEEVKASKFLKLNKMQKAGFLYYEDLASGVTKEEADAVLDIVKETVRTVSPDALVTIAGGFRRGKPQGHDVDLLITIPGRPTDPELLHNVVDLLKKQGLLLYGDIRERTFVEGQLPNPKPDQLDNHQKCFAILKLYRPKVDNSAVGTSKKVDMAEVKDWKAVRVDLVVAPDEQFAYAKLGWTGSGMFRRDTRRYAEEERDMLLDNHGLYDLKKGIFLSADSEEEIFGHLDLDYLEPWERNA

SEQ ID NO: 6147 - DNA, 1182 bp, synthetic construct
  misc_feature 1..1182: note = Variant of terminal deoxynucleotidyl transferase
  source 1..1182: mol_type = other DNA
atgcaccatcatcaccatcacgggggctccggccatccggaaggtaataccccggagaaggaggtgccgagcgttatcgcccgtcatgttagtccgtacgcgtgccagcgcaagaccacgctgaataactacaacaaaaagatcaccgacgcgctggagatcatggccgagaactacaagtttaaagagaacctgcaggcgcgcctggaggcccgtcgcgccgcgagtgtcctgaaaagcctgccgttcgaggttaccagcatgaaagacatccaaggtctgccgtgcattaccgacgacgtacgtcctgtgatcgaagagatcatcgaagtaggcgagagcagccgtgttaaagaaatcctcaatgacgagcgctacaaggcctttaagcagttcaccagcgtgttcggtgtgggcgtcaagaccgcggaaaagtggtaccgtatgggcctccgtacgctggaagaagtaaaggccagtaagttcctgaagctgaacaagatgcagaaggcgggcttcctgtactacgaggatctggcgagcggtgttacgaaagaagaaaaagatgccgttctggatatcgtgaaggaaacggtgtggactgttgatccggatgcgctggtgaccatcgcaggcggtttccgccgtggcaaacctcagggccacgacgttgacctgctgatcacgattccgggccgtcctacggatccggagctgctccacaaagtggttgatctgctcaagaagcaaggtctgctgctgtacggggacatccgtgagcgtacgttcgtggaggggcaactgccaaatcctaaacctgaccagctggacaatcatcagaagtgcttcgccattctcaagctgtacaatccgaaggtggataacagttttgttgggacgtcgaagaaagtcgacatggctgaggttaaggattggaaagcggttcgtgtggatctggtggtcgctccagatgagcagttcgcctatgcgaaactcggttggacgggcagcggcatgtttcgtcgcgatactcgtcgctacgcggaggaagagcgcgacatgctgctcgacaaccatggtctctacgacctgaaaaagggcacttttctgagtgcggacagcgaagaagagattttcggtcatctggacctggattatctggagccgtgggaacgcaacgcg

SEQ ID NO: 6148 - protein, 394 aa, synthetic construct
  REGION 1..394: note = Variant of terminal deoxynucleotidyl transferase
MHHHHHHGGSGHPEGNTPEKEVPSVIARHVSPYACQRKTTLNNYNKKITDALEIMAENYKFKENLQARLEARRAASVLKSLPFEVTSMKDIQGLPCITDDVRPVIEEIIEVGESSRVKEILNDERYKAFKQFTSVFGVGVKTAEKWYRMGLRTLEEVKASKFLKLNKMQKAGFLYYEDLASGVTKEEKDAVLDIVKETVWTVDPDALVTIAGGFRRGKPQGHDVDLLITIPGRPTDPELLHKVVDLLKKQGLLLYGDIRERTFVEGQLPNPKPDQLDNHQKCFAILKLYNPKVDNSFVGTSKKVDMAEVKDWKAVRVDLVVAPDEQFAYAKLGWTGSGMFRRDTRRYAEEERDMLLDNHGLYDLKKGTFLSADSEEEIFGHLDLDYLEPWERNA

SEQ ID NO: 6149 - DNA, 1182 bp, synthetic construct
  misc_feature 1..1182: note = Variant of terminal deoxynucleotidyl transferase
  source 1..1182: mol_type = other DNA
atgcaccatcatcaccatcacgggggctccggccatccggaaggtaataccccggagaaggaggtgccgagcgttatcgcccgtcatgttagtccgtacgcgtgccagcgcaagaccacgctgaataactacaacaaaaagatcaccgacgcgctggagatcatggccgagaactacaagtttaaagagaacctgcaggcgcgcctggaggcccgtcgcgccgcgagtgtcctgaaaagcctgccgttcgaggttaccagcatgaaagacatccaaggtctgccgtgcattaccgacgacgtacgtcctgtgatcgaagagatcatcgaagtaggcgagagcagccgtgttaaagaaatcctcaatgacgagcgctacaaggcctttaagcagttcaccagcgtgttcggtgtgggcgtcaagaccgcggaaaagtggtaccgtatgggcctccgtacgctggaagaagtaaaggccagtaagttcctgaagctgaacaagatgcagaaggcgggcttcctgtactacgaggatctggcgagcggtgttagtaaagaagaagccgatgccgttctggattttgtgaaggaaacggtgcgcactgttagtccggatgcgctggtgaccatcgccggcggtttccgccgtggcaaacctcagggccacgacgttgacctgctgatcacgattccgggccgtcctacggatccggagctgctccacaacgtggttgatctgctcaagaagcaaggtctgctgctgtacggggacatccgtgagcgtacgttcgtggaggggcaactgccaaatcctaaacctgaccagctggacaatcatcagaagtgcttcgccattctcaagctgtacaatccgaaggtggataacagtgcggttgggacgtcgaagaaagtcgacatggctgaggttaaggattggaaagcggttcgtgtggatctggtggtcgctccagatgagcagttcgcctatgcgaaactcggttggacgggcagcggcatgtttcgtcgcgatactcgtcgctacgcggaggaagagcgcgacatgctgctcgacaaccatggtctctacgacctgaaaaagggcatttttctgagtgcggacagcgaagaagagattttcggtcatctggacctggattatctggagccgtgggaacgcaacgcg

SEQ ID NO: 6150 - protein, 394 aa, synthetic construct
  REGION 1..394: note = Variant of terminal deoxynucleotidyl transferase
MHHHHHHGGSGHPEGNTPEKEVPSVIARHVSPYACQRKTTLNNYNKKITDALEIMAENYKFKENLQARLEARRAASVLKSLPFEVTSMKDIQGLPCITDDVRPVIEEIIEVGESSRVKEILNDERYKAFKQFTSVFGVGVKTAEKWYRMGLRTLEEVKASKFLKLNKMQKAGFLYYEDLASGVSKEEADAVLDFVKETVRTVSPDALVTIAGGFRRGKPQGHDVDLLITIPGRPTDPELLHNVVDLLKKQGLLLYGDIRERTFVEGQLPNPKPDQLDNHQKCFAILKLYNPKVDNSAVGTSKKVDMAEVKDWKAVRVDLVVAPDEQFAYAKLGWTGSGMFRRDTRRYAEEERDMLLDNHGLYDLKKGIFLSADSEEEIFGHLDLDYLEPWERNA

SEQ ID NO: 6151 - DNA, 1182 bp, synthetic construct
  misc_feature 1..1182: note = Variant of terminal deoxynucleotidyl transferase
  source 1..1182: mol_type = other DNA
atgcaccatcatcaccatcacgggggctccggccatccggaaggtaataccccggagaaggaggtgccgagcgttatcgcccgtcatgttagtccgtacgcgtgccagcgcaagaccacgctgaataactacaacaaaaagatcaccgacgcgctggagatcatggccgagaactacaagtttaaagagaacctgcaggcgcgcctggaggcccgtcgcgccgcgagtgtcctgaaaagcctgccgttcgaggttaccagcatgaaagacatccaaggtctgccgtgcattaccgacgacgtacgtcctgtgatcgaagagatcatcgaagtaggcgagagcagccgtgttaaagaaatcctcaatgacgagcgctacaaggcctttaagcagttcaccagcgtgttcggtgtgggcgtcaagaccgcggaaaagtggtaccgtatgggcctccgtacgctggaagaagtaaaggccagtaagttcctgaagctgaacaagatgcagaaggcgggcttcctgtactacgaggatctggcgagcggtgttacgaaagaagaaaaagatgccgttctggatatcgtgaaggaaacggtgtggactgttgatccggatgctctggtgaccatcgccggcggtttccgccgtggcaaacctcagggccacgacgttgacctgctgatcacgattccgggccgtcctacggatccggagctgctccacaacgtggttgatctgctcaagaagcaaggtctgctgctgtacggggacatccgtgagcgtacgttcgtggaggggcaactgccaaatcctaaacctgaccagctggacaatcatcagaagtgcttcgccattctcaagctgtaccgcccgaaggtggataacagttttgttgggacgtcgaagaaagtcgacatggctgaggttaaggattggaaagcggttcgtgtggatctggtggtcgctccagatgagcagttcgcctatgcgaaactcggttggacgggcagcggcatgtttcgtcgcgatactcgtcgctacgcggaggaagagcgcgacatgctgctcgacaaccatggtctctacgacctgaaaaagggcatttttctgagtgcggacagcgaagaagagattttcggtcatctggacctggattatctggagccgtgggaacgcaacgcg

SEQ ID NO: 6152 - protein, 394 aa, synthetic construct
  REGION 1..394: note = Variant of terminal deoxynucleotidyl transferase
MHHHHHHGGSGHPEGNTPEKEVPSVIARHVSPYACQRKTTLNNYNKKITDALEIMAENYKFKENLQARLEARRAASVLKSLPFEVTSMKDIQGLPCITDDVRPVIEEIIEVGESSRVKEILNDERYKAFKQFTSVFGVGVKTAEKWYRMGLRTLEEVKASKFLKLNKMQKAGFLYYEDLASGVTKEEKDAVLDIVKETVWTVDPDALVTIAGGFRRGKPQGHDVDLLITIPGRPTDPELLHNVVDLLKKQGLLLYGDIRERTFVEGQLPNPKPDQLDNHQKCFAILKLYRPKVDNSFVGTSKKVDMAEVKDWKAVRVDLVVAPDEQFAYAKLGWTGSGMFRRDTRRYAEEERDMLLDNHGLYDLKKGIFLSADSEEEIFGHLDLDYLEPWERNA

SEQ ID NO: 6153 - DNA, 1182 bp, synthetic construct
  misc_feature 1..1182: note = Variant of terminal deoxynucleotidyl transferase
  source 1..1182: mol_type = other DNA
atgcaccatcatcaccatcacgggggctccggccatccggaaggtaataccccggagaaggaggtgccgagcgttatcgcccgtcatgttagtccgtacgcgtgccagcgcaagaccacgctgaataactacaacaaaaagatcaccgacgcgctggagatcatggccgagaactacaagtttaaagagaacctgcaggcgcgcctggaggcccgtcgcgccgcgagtgtcctgaaaagcctgccgttcgaggttaccagcatgaaagacatccaaggtctgccgtgcattaccgacgacgtacgtcctgtgatcgaagagatcatcgaagtaggcgagagcagccgtgttaaagaaatcctcaatgacgagcgctacaaggcctttaagcagttcaccagcgtgttcggtgtgggcgtcaagaccgcggaaaagtggtaccgtatgggcctccgtacgctggaagaagtaaaggccagtaagttcctgaagctgaacaagatgcagaaggcgggcttcctgtactacgaggatctggcgagcggtgtttcgaaagaagaaaaagatgccgttctggatatcgtgaaggaaacggtgcgcactgttagtccggatgcgctggtgaccatcgtgggcggtttccgccgtggcaaacctcagggccacgacgttgacctgctgatcacgattccgggccgtcctacggatccggagctgctccacaacgtggttgatctgctcaagaagcaaggtctgctgctgtacggggacatccgtgagcgtacgttcgtggaggggcaactgccaaatcctaaacctgaccagctggacaatcatcagaagtgcttcgccattctcaagctgtacaatccgaaggtggataacagttttgttgggacgtcgaagaaagtcgacatggctgaggttaaggattggaaagcggttcgtgtggatctggtggtcgctccagatgagcagttcgcctatgcgaaactcggttggacgggcagcggcatgtttcgtcgcgatactcgtcgctacgcggaggaagagcgcgacatgctgctcgacaaccatggtctctacgacctgaaaaagggcacttttctgagtgcggacagcgaagaagagattttcggtcatctggacctggattatctggagccgtgggaacgcaacgcg

SEQ ID NO: 6154 - protein, 394 aa, synthetic construct
  REGION 1..394: note = Variant of terminal deoxynucleotidyl transferase
MHHHHHHGGSGHPEGNTPEKEVPSVIARHVSPYACQRKTTLNNYNKKITDALEIMAENYKFKENLQARLEARRAASVLKSLPFEVTSMKDIQGLPCITDDVRPVIEEIIEVGESSRVKEILNDERYKAFKQFTSVFGVGVKTAEKWYRMGLRTLEEVKASKFLKLNKMQKAGFLYYEDLASGVSKEEKDAVLDIVKETVRTVSPDALVTIVGGFRRGKPQGHDVDLLITIPGRPTDPELLHNVVDLLKKQGLLLYGDIRERTFVEGQLPNPKPDQLDNHQKCFAILKLYNPKVDNSFVGTSKKVDMAEVKDWKAVRVDLVVAPDEQFAYAKLGWTGSGMFRRDTRRYAEEERDMLLDNHGLYDLKKGTFLSADSEEEIFGHLDLDYLEPWERNA

SEQ ID NO: 6155 - DNA, 1182 bp, synthetic construct
  misc_feature 1..1182: note = Variant of terminal deoxynucleotidyl transferase
  source 1..1182: mol_type = other DNA
atgcaccatcatcaccatcacgggggctccggccatccggaaggtaataccccggagaaggaggtgccgagcgttatcgcccgtcatgttagtccgtacgcgtgccagcgcaagaccacgctgaataactacaacaaaaagatcaccgacgcgctggagatcatggccgagaactacaagtttaaagagaacctgcaggcgcgcctggaggcccgtcgcgccgcgagtgtcctgaaaagcctgccgttcgaggttaccagcatgaaagacatccaaggtctgccgtgcattaccgacgacgtacgtcctgtgatcgaagagatcatcgaagtaggcgagagcagccgtgttaaagaaatcctcaatgacgagcgctacaaggcctttaagcagttcaccagcgtgttcggtgtgggcgtcaagaccgcggaaaagtggtaccgtatgggcctccgtacgctggaagaagtaaaggccagtaagttcctgaagctgaacaagatgcagaaggcgggcttcctgtactacgaggatctggcgagcggtgtttcgaaagaagaagcggatgccgttctggatatcgtgaaggaaacggtgcgcactgttagtccggatgcgctggtgaccatcgccggcggtttccgccgtggcaaacctcagggccacgacgttgacctgctgatcacgattccgggccgtcctacggatccggagctgctccacaaagtggttgatctgctcaagaagcaaggtctgctgctgtacggggacatccgtgagcgtacgttcgtggaggggcaactgccaaatcctaaacctgaccagctggacaatcatcagaagtgcttcgccattctcaagctgtaccgtccgaaggtggataacagttttgttgggacgtcgaagaaagtcgacatggctgaggttaaggattggaaagcggttcgtgtggatctggtggtcgctccagatgagcagttcgcctatgcgaaactcggttggacgggcagcggcatgtttcgtcgcgatactcgtcgctacgcggaggaagagcgcgacatgctgctcgacaaccatggtctctacgacctgaaaaagggcatctttctgagtgcggacagcgaagaagagattttcggtcatctggacctggattatctggagccgtgggaacgcaacgcg

SEQ ID NO: 6156 - protein, 394 aa, synthetic construct
  REGION 1..394: note = Variant of terminal deoxynucleotidyl transferase
MHHHHHHGGSGHPEGNTPEKEVPSVIARHVSPYACQRKTTLNNYNKKITDALEIMAENYKFKENLQARLEARRAASVLKSLPFEVTSMKDIQGLPCITDDVRPVIEEIIEVGESSRVKEILNDERYKAFKQFTSVFGVGVKTAEKWYRMGLRTLEEVKASKFLKLNKMQKAGFLYYEDLASGVSKEEADAVLDIVKETVRTVSPDALVTIAGGFRRGKPQGHDVDLLITIPGRPTDPELLHKVVDLLKKQGLLLYGDIRERTFVEGQLPNPKPDQLDNHQKCFAILKLYRPKVDNSFVGTSKKVDMAEVKDWKAVRVDLVVAPDEQFAYAKLGWTGSGMFRRDTRRYAEEERDMLLDNHGLYDLKKGIFLSADSEEEIFGHLDLDYLEPWERNA

SEQ ID NO: 6157 - DNA, 1182 bp, synthetic construct
  misc_feature 1..1182: note = Variant of terminal deoxynucleotidyl transferase
  source 1..1182: mol_type = other DNA
atgcaccatcatcaccatcacgggggctccggccatccggaaggtaataccccggagaaggaggtgccgagcgttatcgcccgtcatgttagtccgtacgcgtgccagcgcaagaccacgctgaataactacaacaaaaagatcaccgacgcgctggagatcatggccgagaactacaagtttaaagagaacctgcaggcgcgcctggaggcccgtcgcgccgcgagtgtcctgaaaagcctgccgttcgaggttaccagcatgaaagacatccaaggtctgccgtgcattaccgacgacgtacgtcctgtgatcgaagagatcatcgaagtaggcgagagcagccgtgttaaagaaatcctcaatgacgagcgctacaaggcctttaagcagttcaccagcgtgttcggtgtgggcgtcaagaccgcggaaaagtggtaccgtatgggcctccgtacgctggaagaagtaaaggccagtaagttcctgaagctgaacaagatgcagaaggcgggcttcctgtactacgaggatctggcgagcggtgttagtaaagaagaagccgatgccgttgtgggtattgtgaaggaaacggtgcgcactgttagtccggatgcgctggtgaccatcgcaggcggtttccgccgtggcaaacctcagggccacgacgttgacctgctgatcacgattccgggccgtcctacggatccggagctgctccacaaagtggttgatctgctcaagaagcaaggtctgctgctgtacggggacatccgtgagcgtacgttcgtggaggggcaactgccaaatcctaaacctgaccagctggacaatcatcagaagtgcttcgccattctcaagctgtacaatccgaaggtggataacagttttgttgggacgtcgaagaaagtcgacatggctgaggttaaggattggaaagcggttcgtgtggatctggtggtcgctccagatgagcagttcgcctatgcgaaactcggttggacgggcagcggcatgtttcgtcgcgatactcgtcgctacgcggaggaagagcgcgacatgctgctcgacaaccatggtctctacgacctgaaaaagggcacttttctgagtgcggacagcgaagaagagattttcggtcatctggacctggattatctggagccgtgggaacgcaacgcg

SEQ ID NO: 6158 - protein, 394 aa, synthetic construct
  REGION 1..394: note = Variant of terminal deoxynucleotidyl transferase
MHHHHHHGGSGHPEGNTPEKEVPSVIARHVSPYACQRKTTLNNYNKKITDALEIMAENYKFKENLQARLEARRAASVLKSLPFEVTSMKDIQGLPCITDDVRPVIEEIIEVGESSRVKEILNDERYKAFKQFTSVFGVGVKTAEKWYRMGLRTLEEVKASKFLKLNKMQKAGFLYYEDLASGVSKEEADAVVGIVKETVRTVSPDALVTIAGGFRRGKPQGHDVDLLITIPGRPTDPELLHKVVDLLKKQGLLLYGDIRERTFVEGQLPNPKPDQLDNHQKCFAILKLYNPKVDNSFVGTSKKVDMAEVKDWKAVRVDLVVAPDEQFAYAKLGWTGSGMFRRDTRRYAEEERDMLLDNHGLYDLKKGTFLSADSEEEIFGHLDLDYLEPWERNA

SEQ ID NO: 6159 - DNA, 1182 bp, synthetic construct
  misc_feature 1..1182: note = Variant of terminal deoxynucleotidyl transferase
  source 1..1182: mol_type = other DNA
atgcaccatcatcaccatcacgggggctccggccatccggaaggtaataccccggagaaggaggtgccgagcgttatcgcccgtcatgttagtccgtacgcgtgccagcgcaagaccacgctgaataactacaacaaaaagatcaccgacgcgctggagatcatggccgagaactacaagtttaaagagaacctgcaggcgcgcctggaggcccgtcgcgccgcgagtgtcctgaaaagcctgccgttcgaggttaccagcatgaaagacatccaaggtctgccgtgcattaccgacgacgtacgtcctgtgatcgaagagatcatcgaagtaggcgagagcagccgtgttaaagaaatcctcaatgacgagcgctacaaggcctttaagcagttcaccagcgtgttcggtgtgggcgtcaagaccgcggaaaagtggtaccgtatgggcctccgtacgctggaagaagtaaaggccagtaagttcctgaagctgaacaagatgcagaaggcgggcttcctgtactacgaggatctggcgagcggtgtttcgaaagaagaagcggatgccgttctggatatcgtgaaggaaacggtgcgtactgttgatccggatcctctggtgaccatcgccggcggtttccgccgtggcaaacctcagggccacgacgttgacctgctgatcacgattccgggccgtcctacggatccggagctgctccacaaagtggttgatctgctcaagaagcaaggtctgctgctgtacggggacatccgtgagcgtacgttcgtggaggggcaactgccaaatcctaaacctgaccagctggacaatcatcagaagtgcttcgccattctcaagctgtaccgcccgaaggtggataacagtgcggttgggacgtcgaagaaagtcgacatggctgaggttaaggattggaaagcggttcgtgtggatctggtggtcgctccagatgagcagttcgcctatgcgaaactcggttggacgggcagcggcatgtttcgtcgcgatactcgtcgctacgcggaggaagagcgcgacatgctgctcgacaaccatggtctctacgacctgaaaaagggcacttttctgagtgcggacagcgaagaagagattttcggtcatctggacctggattatctggagccgtgggaacgcaacgcg

SEQ ID NO: 6160 - protein, 394 aa, synthetic construct
  REGION 1..394: note = Variant of terminal deoxynucleotidyl transferase
MHHHHHHGGSGHPEGNTPEKEVPSVIARHVSPYACQRKTTLNNYNKKITDALEIMAENYKFKENLQARLEARRAASVLKSLPFEVTSMKDIQGLPCITDDVRPVIEEIIEVGESSRVKEILNDERYKAFKQFTSVFGVGVKTAEKWYRMGLRTLEEVKASKFLKLNKMQKAGFLYYEDLASGVSKEEADAVLDIVKETVRTVDPDPLVTIAGGFRRGKPQGHDVDLLITIPGRPTDPELLHKVVDLLKKQGLLLYGDIRERTFVEGQLPNPKPDQLDNHQKCFAILKLYRPKVDNSAVGTSKKVDMAEVKDWKAVRVDLVVAPDEQFAYAKLGWTGSGMFRRDTRRYAEEERDMLLDNHGLYDLKKGTFLSADSEEEIFGHLDLDYLEPWERNA

SEQ ID NO: 6161 - DNA, 1182 bp, synthetic construct
  misc_feature 1..1182: note = Variant of terminal deoxynucleotidyl transferase
  source 1..1182: mol_type = other DNA
atgcaccatcatcaccatcacgggggctccggccatccggaaggtaataccccggagaaggaggtgccgagcgttatcgcccgtcatgttagtccgtacgcgtgccagcgcaagaccacgctgaataactacaacaaaaagatcaccgacgcgctggagatcatggccgagaactacaagtttaaagagaacctgcaggcgcgcctggaggcccgtcgcgccgcgagtgtcctgaaaagcctgccgttcgaggttaccagcatgaaagacatccaaggtctgccgtgcattaccgacgacgtacgtcctgtgatcgaagagatcatcgaagtaggcgagagcagccgtgttaaagaaatcctcaatgacgagcgctacaaggcctttaagcagttcaccagcgtgttcggtgtgggcgtcaagaccgcggaaaagtggtaccgtatgggcctccgtacgctggaagaagtaaaggccagtaagttcctgaagctgaacaagatgcagaaggcgggcttcctgtactacgaggatctggcgagcggtgttacgaaagaagaagcggctgccgttctggatatcgtgaaggaaacggtgcgcactgttagtccggatccgctggtgaccatcgcaggcggtttccgccgtggcaaacctcagggccacgacgttgacctgctgatcacgattccgggccgtcctacggatccggagctgctccacaaagtggttgatctgctcaagaagcaaggtctgctgctgtacggggacatccgtgagcgtacgttcgtggaggggcaactgccaaatcctaaacctgaccagctggacaatcatcagaagtgcttcgccattctcaagctgtaccgcccgaaggtggataacagttttgttgggacgtcgaagaaagtcgacatggctgaggttaaggattggaaagcggttcgtgtggatctggtggtcgctccagatgagcagttcgcctatgcgaaactcggttggacgggcagcggcatgtttcgtcgcgatactcgtcgctacgcggaggaagagcgcgacatgctgctcgacaaccatggtctctacgacctgaaaaagggcacttttctgagtgcggacagcgaagaagagattttcggtcatctggacctggattatctggagccgtgggaacgcaacgcg

SEQ ID NO: 6162 - protein, 394 aa, synthetic construct
  REGION 1..394: note = Variant of terminal deoxynucleotidyl transferase
MHHHHHHGGSGHPEGNTPEKEVPSVIARHVSPYACQRKTTLNNYNKKITDALEIMAENYKFKENLQARLEARRAASVLKSLPFEVTSMKDIQGLPCITDDVRPVIEEIIEVGESSRVKEILNDERYKAFKQFTSVFGVGVKTAEKWYRMGLRTLEEVKASKFLKLNKMQKAGFLYYEDLASGVTKEEAAAVLDIVKETVRTVSPDPLVTIAGGFRRGKPQGHDVDLLITIPGRPTDPELLHKVVDLLKKQGLLLYGDIRERTFVEGQLPNPKPDQLDNHQKCFAILKLYRPKVDNSFVGTSKKVDMAEVKDWKAVRVDLVVAPDEQFAYAKLGWTGSGMFRRDTRRYAEEERDMLLDNHGLYDLKKGTFLSADSEEEIFGHLDLDYLEPWERNA

SEQ ID NO: 6163 - DNA, 1182 bp, synthetic construct
  misc_feature 1..1182: note = Variant of terminal deoxynucleotidyl transferase
  source 1..1182: mol_type = other DNA
atgcaccatcatcaccatcacgggggctccggccatccggaaggtaataccccggagaaggaggtgccgagcgttatcgcccgtcatgttagtccgtacgcgtgccagcgcaagaccacgctgaataactacaacaaaaagatcaccgacgcgctggagatcatggccgagaactacaagtttaaagagaacctgcaggcgcgcctggaggcccgtcgcgccgcgagtgtcctgaaaagcctgccgttcgaggttaccagcatgaaagacatccaaggtctgccgtgcattaccgacgacgtacgtcctgtgatcgaagagatcatcgaagtaggcgagagcagccgtgttaaagaaatcctcaatgacgagcgctacaaggcctttaagcagttcaccagcgtgttcggtgtgggcgtcaagaccgcggaaaagtggtaccgtatgggcctccgtacgctggaagaagtaaaggccagtaagttcctgaagctgaacaagatgcagaaggcgggcttcctgtactacgaggatctggcgagcggtgttacgaaagaagaagcggatgccgttctggatatcgtgaaggaaacggtgcgcactgttagtccggatgcgctggtgaccatcgtgggcggtttccgccgtggcaaacctcagggccacgacgttgacctgctgatcacgattccgggccgtcctacggatccggagctgctccacaaagtggttgatctgctcaagaagcaaggtctgctgctgtacggggacatccgtgagcgtacgttcgtggaggggcaactgccaaatcctaaacctgaccagctggacaatcatcagaagtgcttcgccattctcaagctgtaccgtccgaaggtggataacagtgcggttgggacgtcgaagaaagtcgacatggctgaggttaaggattggaaagcggttcgtgtggatctggtggtcgctccagatgagcagttcgcctatgcgaaactcggttggacgggcagcggcatgtttcgtcgcgatactcgtcgctacgcggaggaagagcgcgacatgctgctcgacaaccatggtctctacgacctgaaaaagggcatctttctgagtgcggacagcgaagaagagattttcggtcatctggacctggattatctggagccgtgggaacgcaacgcg

SEQ ID NO: 6164 - protein, 394 aa, synthetic construct
  REGION 1..394: note = Variant of terminal deoxynucleotidyl transferase
MHHHHHHGGSGHPEGNTPEKEVPSVIARHVSPYACQRKTTLNNYNKKITDALEIMAENYKFKENLQARLEARRAASVLKSLPFEVTSMKDIQGLPCITDDVRPVIEEIIEVGESSRVKEILNDERYKAFKQFTSVFGVGVKTAEKWYRMGLRTLEEVKASKFLKLNKMQKAGFLYYEDLASGVTKEEADAVLDIVKETVRTVSPDALVTIVGGFRRGKPQGHDVDLLITIPGRPTDPELLHKVVDLLKKQGLLLYGDIRERTFVEGQLPNPKPDQLDNHQKCFAILKLYRPKVDNSAVGTSKKVDMAEVKDWKAVRVDLVVAPDEQFAYAKLGWTGSGMFRRDTRRYAEEERDMLLDNHGLYDLKKGIFLSADSEEEIFGHLDLDYLEPWERNA

SEQ ID NO: 6165 - DNA, 1182 bp, synthetic construct
  misc_feature 1..1182: note = Variant of terminal deoxynucleotidyl transferase
  source 1..1182: mol_type = other DNA
atgcaccatcatcaccatcacgggggctccggccatccggaaggtaataccccggagaaggaggtgccgagcgttatcgcccgtcatgttagtccgtacgcgtgccagcgcaagaccacgctgaataactacaacaaaaagatcaccgacgcgctggaaatcatggccgagaactacaagtttaaagagaacctgcaggcgcgcctggaggcccgtcgcgccgcgagtgtcctgaaaagcctgccgttcgaggttaccagcatgaaagacatccaaggtctgccgtgcattaccgacgacgtacgtcctgtgatcgaagagatcatcgaagtaggcgagagcagccgtgttaaagaaatcctcaatgacgagcgctacaaggcctttaagcagttcaccagcgtgttcggtgtgggcgtcaagaccgcggaaaagtggtaccgtatgggcctccgtacgctggaagaagtaaaggccagtaagttcctgaagctgaacaagatgcagaaggcgggcttcctgtactacgaggatctggcgagcggtgtttcgaaagaagaagcggatgccgttctggatatcgtgaaggaaacggtgcgcactgttagtccggatgcgctggtgaccatcgccggcggtttccgccgtggcaaacctcagggccacgacgttgacctgctgatcacgattccgggccgtcctacggatccggagctgctccacaacgtggttgatctgctcaagaagcaaggtctgctgctgtacggggacatccgtgagcgtacgttcgtggaggggcaactgccaaatcctaaacctgaccagctggacaatcatcagaagtgcttcgccattctcaagctgtacaatccgaaggtggataacagtgcggttgggacgtcgaagaaagtcgacatggctgaggttaaggattggaaagcggttcgtgtggatctggtggtcgctccagatgagcagttcgcctatgcgaaactcggttggacgggcagcggcatgtttcgtcgcgatactcgtcgctacgcggaggaagagcgcgacatgctgctcgacaaccatggtctctacgacctgaaaaagggcatttttctgagtgcggacagcgaagaagagattttcggtcatctggacctggattatctggagccgtgggaacgcaacgcg

SEQ ID NO: 6166 - protein, 394 aa, synthetic construct
  REGION 1..394: note = Variant of terminal deoxynucleotidyl transferase
MHHHHHHGGSGHPEGNTPEKEVPSVIARHVSPYACQRKTTLNNYNKKITDALEIMAENYKFKENLQARLEARRAASVLKSLPFEVTSMKDIQGLPCITDDVRPVIEEIIEVGESSRVKEILNDERYKAFKQFTSVFGVGVKTAEKWYRMGLRTLEEVKASKFLKLNKMQKAGFLYYEDLASGVSKEEADAVLDIVKETVRTVSPDALVTIAGGFRRGKPQGHDVDLLITIPGRPTDPELLHNVVDLLKKQGLLLYGDIRERTFVEGQLPNPKPDQLDNHQKCFAILKLYNPKVDNSAVGTSKKVDMAEVKDWKAVRVDLVVAPDEQFAYAKLGWTGSGMFRRDTRRYAEEERDMLLDNHGLYDLKKGIFLSADSEEEIFGHLDLDYLEPWERNA

SEQ ID NO: 6167 - DNA, 1182 bp, synthetic construct
  misc_feature 1..1182: note = Variant of terminal deoxynucleotidyl transferase
  source 1..1182: mol_type = other DNA
atgcaccatcatcaccatcacgggggctccggccatccggaaggtaataccccggagaaggaggtgccgagcgttatcgcccgtcatgttagtccgtacgcgtgccagcgcaagaccacgctgaataactacaacaaaaagatcaccgacgcgctggagatcatggccgagaactacaagtttaaagagaacctgcaggcgcgcctggaggcccgtcgcgccgcgagtgtcctgaaaagcctgccgttcgaggttaccagcatgaaagacatccaaggtctgccgtgcattaccgacgacgtacgtcctgtgatcgaagagatcatcgaagtaggcgagagcagccgtgttaaagaaatcctcaatgacgagcgctacaaggcctttaagcagttcaccagcgtgttcggtgtgggcgtcaagaccgcggaaaagtggtaccgtatgggcctccgtacgctggaagaagtaaaggccagtaagttcctgaagctgaacaagatgcagaaggcgggcttcctgtactacgaggatctggcgagcggtgttagtaaagaagaagccgatgccgttctggatattgtgaaggaaacggtgcgcactgttagtccggatgcgctggtgaccatcgtgggcggtttccgccgtggcaaacctcagggccacgacgttgacctgctgatcacgattccgggccgtcctacggatccggagctgctccacaaggtggttgatctgctcaagaagcaaggtctgctgctgtacggggacatccgtgagcgtacgttcgtggaggggcaactgccaaatcctaaacctgaccagctggacaatcatcagaagtgcttcgccattctcaagctgtaccgtccgaaggtggataacagtgcggttgggacgtcgaagaaagtcgacatggctgaggttaaggattggaaagcggttcgtgtggatctggtggtcgctccagatgagcagttcgcctatgcgaaactcggttggacgggcagcggcatgtttcgtcgcgatactcgtcgctacgcggaggaagagcgcgacatgctgctcgacaaccatggtctctacgacctgaaaaagggcacttttctgagtgcggacagcgaagaagagattttcggtcatctggacctggattatctggagccgtgggaacgcaacgcg

SEQ ID NO: 6168 - protein, 394 aa, synthetic construct
  REGION 1..394: note = Variant of terminal deoxynucleotidyl transferase
MHHHHHHGGSGHPEGNTPEKEVPSVIARHVSPYACQRKTTLNNYNKKITDALEIMAENYKFKENLQARLEARRAASVLKSLPFEVTSMKDIQGLPCITDDVRPVIEEIIEVGESSRVKEILNDERYKAFKQFTSVFGVGVKTAEKWYRMGLRTLEEVKASKFLKLNKMQKAGFLYYEDLASGVSKEEADAVLDIVKETVRTVSPDALVTIVGGFRRGKPQGHDVDLLITIPGRPTDPELLHKVVDLLKKQGLLLYGDIRERTFVEGQLPNPKPDQLDNHQKCFAILKLYRPKVDNSAVGTSKKVDMAEVKDWKAVRVDLVVAPDEQFAYAKLGWTGSGMFRRDTRRYAEEERDMLLDNHGLYDLKKGTFLSADSEEEIFGHLDLDYLEPWERNA

SEQ ID NO: 6169 - DNA, 1182 bp, synthetic construct
  misc_feature 1..1182: note = Variant of terminal deoxynucleotidyl transferase
  source 1..1182: mol_type = other DNA
atgcaccatcatcaccatcacgggggctccggccatccggaaggtaataccccggagaaggaggtgccgagcgttatcgcccgtcatgttagtccgtacgcgtgccagcgcaagaccacgctgaataactacaacaaaaagatcaccgacgcgctggagatcatggccgagaactacaagtttaaagagaacctgcaggcgcgcctggaggcccgtcgcgccgcgagtgtcctgaaaagcctgccgttcgaggttaccagcatgaaagacatccaaggtctgccgtgcattaccgacgacgtacgtcctgtgatcgaagagatcatcgaagtaggcgagagcagccgtgttaaagaaatcctcaatgacgagcgctacaaggcctttaagcagttcaccagcgtgttcggtgtgggcgtcaagaccgcggaaaagtggtaccgtatgggcctccgtacgctggaagaagtaaaggccagtaagttcctgaagctgaacaagatgcagaaggcgggcttcctgtactacgaggatctggcgagcggtgttagtaaagaagaagccgatgccgttctggatatcgtgaaggaaacggtgcgcactgttagtccggatgcgctggtgaccatcgccggcggtttccgccgtggcaaacctcagggccacgacgttgacctgctgatcacgattccgggccgtcctacggatccggagctgctccacaacgtggttgatctgctcaagaagcaaggtctgctgctgtacggggacatccgtgagcgtacgttcgtggaggggcaactgccaaatcctaaacctgaccagctggacaatcatcagaagtgcttcgccattctcaagctgtacaatccgaaggtggataacagttttgttgggacgtcgaagaaagtcgacatggctgaggttaaggattggaaagcggttcgtgtggatctggtggtcgctccagatgagcagttcgcctatgcgaaactcggttggacgggcagcggcatgtttcgtcgcgatactcgtcgctacgcggaggaagagcgcgacatgctgctcgacaaccatggtctctacgacctgaaaaagggcatttttctgagtgcggacagcgaagaagagattttcggtcatctggacctggattatctggagccgtgggaacgcaacgcg

SEQ ID NO: 6170 - protein, 394 aa, synthetic construct
  REGION 1..394: note = Variant of terminal deoxynucleotidyl transferase
MHHHHHHGGSGHPEGNTPEKEVPSVIARHVSPYACQRKTTLNNYNKKITDALEIMAENYKFKENLQARLEARRAASVLKSLPFEVTSMKDIQGLPCITDDVRPVIEEIIEVGESSRVKEILNDERYKAFKQFTSVFGVGVKTAEKWYRMGLRTLEEVKASKFLKLNKMQKAGFLYYEDLASGVSKEEADAVLDIVKETVRTVSPDALVTIAGGFRRGKPQGHDVDLLITIPGRPTDPELLHNVVDLLKKQGLLLYGDIRERTFVEGQLPNPKPDQLDNHQKCFAILKLYNPKVDNSFVGTSKKVDMAEVKDWKAVRVDLVVAPDEQFAYAKLGWTGSGMFRRDTRRYAEEERDMLLDNHGLYDLKKGIFLSADSEEEIFGHLDLDYLEPWERNA

SEQ ID NO: 6171 - DNA, 1182 bp, synthetic construct
  misc_feature 1..1182: note = Variant of terminal deoxynucleotidyl transferase
  source 1..1182: mol_type = other DNA
atgcaccatcatcaccatcacgggggctccggccatccggaaggtaataccccggagaaggaggtgccgagcgttatcgcccgtcatgttagtccgtacgcgtgccagcgcaagaccacgctgaataactacaacaaaaagatcaccgacgcgctggagatcatggccgagaactacaagtttaaagagaacctgcaggcgcgcctggaggcccgtcgcgccgcgagtgtcctgaaaagcctgccgttcgaggttaccagcatgaaagacatccaaggtctgccgtgcattaccgacgacgtacgtcctgtgatcgaagagatcatcgaagtaggcgagagcagccgtgttaaagaaatcctcaatgacgagcgctacaaggcctttaagcagttcaccagcgtgttcggtgtgggcgtcaagaccgcggaaaagtggtaccgtatgggcctccgtacgctggaagaagtaaaggccagtaagttcctgaagctgaacaagatgcagaaggcgggcttcctgtactacgaggatctggcgagcggtgttagtaaagaagaagccgatgccgttgtgggtattgtgaaggaaacggtgcgcactgttagtccggatgcgctggtgaccatcgtgggcggtttccgccgtggcaaacctcagggccacgacgttgacctgctgatcacgattccgggccgtcctacggatccggagctgctccacaacgtggttgatctgctcaagaagcaaggtctgctgctgtacggggacatccgtgagcgtacgttcgtggaggggcaactgccaaatcctaaacctgaccagctggacaatcatcagaagtgcttcgccattctcaagctgtaccgcccgaaggtggataacagttttgttgggacgtcgaagaaagtcgacatggctgaggttaaggattggaaagcggttcgtgtggatctggtggtcgctccagatgagcagttcgcctatgcgaaactcggttggacgggcagcggcatgtttcgtcgcgatactcgtcgctacgcggaggaagagcgcgacatgctgctcgacaaccatggtctctacgacctgaaaaagggcacttttctgagtgcggacagcgaagaagagattttcggtcatctggacctggattatctggagccgtgggaacgcaacgcg

SEQ ID NO: 6172 - protein, 394 aa, synthetic construct
  REGION 1..394: note = Variant of terminal deoxynucleotidyl transferase
MHHHHHHGGSGHPEGNTPEKEVPSVIARHVSPYACQRKTTLNNYNKKITDALEIMAENYKFKENLQARLEARRAASVLKSLPFEVTSMKDIQGLPCITDDVRPVIEEIIEVGESSRVKEILNDERYKAFKQFTSVFGVGVKTAEKWYRMGLRTLEEVKASKFLKLNKMQKAGFLYYEDLASGVSKEEADAVVGIVKETVRTVSPDALVTIVGGFRRGKPQGHDVDLLITIPGRPTDPELLHNVVDLLKKQGLLLYGDIRERTFVEGQLPNPKPDQLDNHQKCFAILKLYRPKVDNSFVGTSKKVDMAEVKDWKAVRVDLVVAPDEQFAYAKLGWTGSGMFRRDTRRYAEEERDMLLDNHGLYDLKKGTFLSADSEEEIFGHLDLDYLEPWERNA

SEQ ID NO: 6173 - DNA, 1182 bp, synthetic construct
  misc_feature 1..1182: note = Variant of terminal deoxynucleotidyl transferase
  source 1..1182: mol_type = other DNA
atgcaccatcatcaccatcacgggggctccggccatccggaaggtaataccccggagaaggaggtgccgagcgttatcgcccgtcatgttagtccgtacgcgtgccagcgcaagaccacgctgaataactacaacaaaaagatcaccgacgcgctggagatcatggccgagaactacaagtttaaagagaacctgcaggcgcgcctggaggcccgtcgcgccgcgagtgtcctgaaaagcctgccgttcgaggttaccagcatgaaagacatccaaggtctgccgtgcattaccgacgacgtacgtcctgtgatcgaagagatcatcgaagtaggcgagagcagccgtgttaaagaaatcctcaatgacgagcgctacaaggcctttaagcagttcaccagcgtgttcggtgtgggcgtcaagaccgcggaaaagtggtaccgtatgggcctccgtacgctggaagaagtaaaggccagtaagttcctgaagctgaacaagatgcagaaggcgggcttcctgtactacgaggatctggcgagcggtgttagtaaagaagaagccgatgccgttctggattttgtgaaggaaacggtgcgcactgttagtccggatgcgctggtgaccatcgccggcggtttccgccgtggcaaacctcagggccacgacgttgacctgctgatcacgattccgggccgtcctacggatccggagctgctccacaacgtggttgatctgctcaagaagcaaggtctgctgctgtacggggacatccgtgagcgtacgttcgtggaggggcaactgccaaatcctaaacctgaccagctggacaatcatcagaagtgcttcgccattctcaagctgtaccgtccgaaggtggataacagtgcggttgggacgtcgaagaaagtcgacatggctgaggttaaggattggaaagcggttcgtgtggatctggtggtcgctccagatgagcagttcgcctatgcgaaactcggttggacgggcagcggcatgtttcgtcgcgatactcgtcgctacgcggaggaagagcgcgacatgctgctcgacaaccatggtctctacgacctgaaaaagggcatttttctgagtgcggacagcgaagaagagattttcggtcatctggacctggattatctggagccgtgggaacgcaacgcg

SEQ ID NO: 6174 - protein, 394 aa, synthetic construct
  REGION 1..394: note = Variant of terminal deoxynucleotidyl transferase
MHHHHHHGGSGHPEGNTPEKEVPSVIARHVSPYACQRKTTLNNYNKKITDALEIMAENYKFKENLQARLEARRAASVLKSLPFEVTSMKDIQGLPCITDDVRPVIEEIIEVGESSRVKEILNDERYKAFKQFTSVFGVGVKTAEKWYRMGLRTLEEVKASKFLKLNKMQKAGFLYYEDLASGVSKEEADAVLDFVKETVRTVSPDALVTIAGGFRRGKPQGHDVDLLITIPGRPTDPELLHNVVDLLKKQGLLLYGDIRERTFVEGQLPNPKPDQLDNHQKCFAILKLYRPKVDNSAVGTSKKVDMAEVKDWKAVRVDLVVAPDEQFAYAKLGWTGSGMFRRDTRRYAEEERDMLLDNHGLYDLKKGIFLSADSEEEIFGHLDLDYLEPWERNA

SEQ ID NO: 6175 - DNA, 1182 bp, synthetic construct
  misc_feature 1..1182: note = Variant of terminal deoxynucleotidyl transferase
  source 1..1182: mol_type = other DNA
atgcaccatcatcaccatcacgggggctccggccatccggaaggtaataccccggagaaggaggtgccgagcgttatcgcccgtcatgttagtccgtacgcgtgccagcgcaagaccacgctgaataactacaacaaaaagatcaccgacgcgctggagatcatggccgagaactacaagtttaaagagaacctgcaggcgcgcctggaggcccgtcgcgccgcgagtgtcctgaaaagcctgccgttcgaggttaccagcatgaaagacatccaaggtctgccgtgcattaccgacgacgtacgtcctgtgatcgaagagatcatcgaagtaggcgagagcagccgtgttaaagaaatcctcaatgacgagcgctacaaggcctttaagcagttcaccagcgtgttcggtgtgggcgtcaagaccgcggaaaagtggtaccgtatgggcctccgtacgctggaagaagtaaaggccagtaagttcctgaagctgaacaagatgcagaaggcgggcttcctgtactacgaggatctggcgagcggtgttacgaaagaagaagcggatgccgttctggatatcgtgaaggaaacggtgcgcactgttagtccggatgcgctggtgaccatcgcaggcggtttccgccgtggcaaacctcagggccacgacgttgacctgctgatcacgattccgggccgtcctacggatccggagctgctccacaaggtggttgatctgctcaagaagcaaggtctgctgctgtacggggacatccgtgagcgtacgttcgtggaggggcaactgccaaatcctaaacctgaccagctggacaatcatcagaagtgcttcgccattctcaagctgtacaatccgaaggtggataacagtgcggttgggacgtcgaagaaagtcgacatggctgaggttaaggattggaaagcggttcgtgtggatctggtggtcgctccagatgagcagttcgcctatgcgaaactcggttggacgggcagcggcatgtttcgtcgcgatactcgtcgctacgcggaggaagagcgcgacatgctgctcgacaaccatggtctctacgacctgaaaaagggcacttttctgagtgcggacagcgaagaagagattttcggtcatctggacctggattatctggagccgtgggaacgcaacgcg

SEQ ID NO: 6176 - protein, 394 aa, synthetic construct
  REGION 1..394: note = Variant of terminal deoxynucleotidyl transferase
MHHHHHHGGSGHPEGNTPEKEVPSVIARHVSPYACQRKTTLNNYNKKITDALEIMAENYKFKENLQARLEARRAASVLKSLPFEVTSMKDIQGLPCITDDVRPVIEEIIEVGESSRVKEILNDERYKAFKQFTSVFGVGVKTAEKWYRMGLRTLEEVKASKFLKLNKMQKAGFLYYEDLASGVTKEEADAVLDIVKETVRTVSPDALVTIAGGFRRGKPQGHDVDLLITIPGRPTDPELLHKVVDLLKKQGLLLYGDIRERTFVEGQLPNPKPDQLDNHQKCFAILKLYNPKVDNSAVGTSKKVDMAEVKDWKAVRVDLVVAPDEQFAYAKLGWTGSGMFRRDTRRYAEEERDMLLDNHGLYDLKKGTFLSADSEEEIFGHLDLDYLEPWERNA

SEQ ID NO: 6177 - DNA, 1182 bp, synthetic construct
  misc_feature 1..1182: note = Variant of terminal deoxynucleotidyl transferase
  source 1..1182: mol_type = other DNA
atgcaccatcatcaccatcacgggggctccggccatccggaaggtaataccccggagaaggaggtgccgagcgttatcgcccgtcatgttagtccgtacgcgtgccagcgcaagaccacgctgaataactacaacaaaaagatcaccgacgcgctggagatcatggccgagaactacaagtttaaagagaacctgcaggcgcgcctggaggcccgtcgcgccgcgagtgtcctgaaaagcctgccgttcgaggttaccagcatgaaagacatccaaggtctgccgtgcattaccgacgacgtacgtcctgtgatcgaagagatcatcgaagtaggcgagagcagccgtgttaaagaaatcctcaatgacgagcgctacaaggcctttaagcagttcaccagcgtgttcggtgtgggcgtcaagaccgcggaaaagtggtaccgtatgggcctccgtacgctggaagaagtaaaggccagtaagttcctgaagctgaacaagatgcagaaggcgggcttcctgtactacgaggatctggcgagcggtgttacgaaagaagaagcggatgccgttctggatatcgtgaaggaaacggtgcgcactgttagtccggatgcgctggtgaccatcgcaggcggtttccgccgtggcaaacctcagggccacgacgttgacctgctgatcacgattccgggccgtcctacggatccggagctgctccacaacgtggttgatctgctcaagaagcaaggtctgctgctgtacggggacatccgtgagcgtacgttcgtggaggggcaactgccaaatcctaaacctgaccagctggacaatcatcagaagtgcttcgccattctcaagctgtaccgtccgaaggtggataacagttttgttgggacgtcgaagaaagtcgacatggctgaggttaaggattggaaagcggttcgtgtggatctggtggtcgctccagatgagcagttcgcctatgcgaaactcggttggacgggcagcggcatgtttcgtcgcgatactcgtcgctacgcggaggaagagcgcgacatgctgctcgacaaccatggtctctacgacctgaaaaagggcacttttctgagtgcggacagcgaagaagagattttcggtcatctggacctggattatctggagccgtgggaacgcaacgcg

SEQ ID NO: 6178 - protein, 394 aa, synthetic construct
  REGION 1..394: note = Variant of terminal deoxynucleotidyl transferase
MHHHHHHGGSGHPEGNTPEKEVPSVIARHVSPYACQRKTTLNNYNKKITDALEIMAENYKFKENLQARLEARRAASVLKSLPFEVTSMKDIQGLPCITDDVRPVIEEIIEVGESSRVKEILNDERYKAFKQFTSVFGVGVKTAEKWYRMGLRTLEEVKASKFLKLNKMQKAGFLYYEDLASGVTKEEADAVLDIVKETVRTVSPDALVTIAGGFRRGKPQGHDVDLLITIPGRPTDPELLHNVVDLLKKQGLLLYGDIRERTFVEGQLPNPKPDQLDNHQKCFAILKLYRPKVDNSFVGTSKKVDMAEVKDWKAVRVDLVVAPDEQFAYAKLGWTGSGMFRRDTRRYAEEERDMLLDNHGLYDLKKGTFLSADSEEEIFGHLDLDYLEPWERNA

SEQ ID NO: 6179 - DNA, 1182 bp, synthetic construct
  misc_feature 1..1182: note = Variant of terminal deoxynucleotidyl transferase
  source 1..1182: mol_type = other DNA
atgcaccatcatcaccatcacgggggctccggccatccggaaggtaataccccggagaaggaggtgccgagcgttatcgcccgtcatgttagtccgtacgcgtgccagcgcaagaccacgctgaataactacaacaaaaagatcaccgacgcgctggagatcatggccgagaactacaagtttaaagagaacctgcaggcgcgcctggaggcccgtcgcgccgcgagtgtcctgaaaagcctgccgttcgaggttaccagcatgaaagacatccaaggtctgccgtgcattaccgacgacgtacgtcctgtgatcgaagagatcatcgaagtaggcgagagcagccgtgttaaagaaatcctcaatgacgagcgctacaaggcctttaagcagttcaccagcgtgttcggtgtgggcgtcaagaccgcggaaaagtggtaccgtatgggcctccgtacgctggaagaagtaaaggccagtaagttcctgaagctgaacaagatgcagaaggcgggcttcctgtactacgaggatctggcgagcggtgttagtaaagaagaagccgatgccgttctggattttgtgaaggaaacggtgcgcactgttagtccggatgcgctggtgaccatcgccggcggtttccgccgtggcaaacctcagggccacgacgttgacctgctgatcacgattccgggccgtcctacggatccggagctgctccacaaggtggttgatctgctcaagaagcaaggtctgctgctgtacggggacatccgtgagcgtacgttcgtggaggggcaactgccaaatcctaaacctgaccagctggacaatcatcagaagtgcttcgccattctcaagctgtaccgcccgaaggtggataacagtgcggttgggacgtcgaagaaagtcgacatggctgaggttaaggattggaaagcggttcgtgtggatctggtggtcgctccagatgagcagttcgcctatgcgaaactcggttggacgggcagcggcatgtttcgtcgcgatactcgtcgctacgcggaggaagagcgcgacatgctgctcgacaaccatggtctctacgacctgaaaaagggcatctttctgagtgcggacagcgaagaagagattttcggtcatctggacctggattatctggagccgtgggaacgcaacgcg

SEQ ID NO: 6180 - protein, 394 aa, synthetic construct
  REGION 1..394: note = Variant of terminal deoxynucleotidyl transferase
MHHHHHHGGSGHPEGNTPEKEVPSVIARHVSPYACQRKTTLNNYNKKITDALEIMAENYKFKENLQARLEARRAASVLKSLPFEVTSMKDIQGLPCITDDVRPVIEEIIEVGESSRVKEILNDERYKAFKQFTSVFGVGVKTAEKWYRMGLRTLEEVKASKFLKLNKMQKAGFLYYEDLASGVSKEEADAVLDFVKETVRTVSPDALVTIAGGFRRGKPQGHDVDLLITIPGRPTDPELLHKVVDLLKKQGLLLYGDIRERTFVEGQLPNPKPDQLDNHQKCFAILKLYRPKVDNSAVGTSKKVDMAEVKDWKAVRVDLVVAPDEQFAYAKLGWTGSGMFRRDTRRYAEEERDMLLDNHGLYDLKKGIFLSADSEEEIFGHLDLDYLEPWERNA

SEQ ID NO: 6181 - DNA, 1182 bp, synthetic construct
  misc_feature 1..1182: note = Variant of terminal deoxynucleotidyl transferase
  source 1..1182: mol_type = other DNA
atgcaccatcatcaccatcacgggggctccggccatccggaaggtaataccccggagaaggaggtgccgagcgttatcgcccgtcatgttagtccgtacgcgtgccagcgcaagaccacgctgaataactacaacaaaaagatcaccgacgcgctggagatcatggccgagaactacaagtttaaagagaacctgcaggcgcgcctggaggcccgtcgcgccgcgagtgtcctgaaaagcctgccgttcgaggttaccagcatgaaagacatccaaggtctgccgtgcattaccgacgacgtacgtcctgtgatcgaagagatcatcgaagtaggcgagagcagccgtgttaaagaaatcctcaatgacgagcgctacaaggcctttaagcagttcaccagcgtgttcggtgtgggcgtcaagaccgcggaaaagtggtaccgtatgggcctccgtacgctggaagaagtaaaggccagtaagttcctgaagctgaacaagatgcagaaggcgggcttcctgtactacgaggatctggcgagcggtgtttcgaaagaagaagcggatgccgttctggatatcgtgaaggaaacggtgtggactgttgatccggatgctctggtgaccatcgccggcggtttccgccgtggcaaacctcagggccacgacgttgacctgctgatcacgattccgggccgtcctacggatccggagctgctccacaaggtggttgatctgctcaagaagcaaggtctgctgctgtacggggacatccgtgagcgtacgttcgtggaggggcaactgccaaatcctaaacctgaccagctggacaatcatcagaagtgcttcgccattctcaagctgtaccgcccgaaggtggataacagtgcggttgggacgtcgaagaaagtcgacatggctgaggttaaggattggaaagcggttcgtgtggatctggtggtcgctccagatgagcagttcgcctatgcgaaactcggttggacgggcagcggcatgtttcgtcgcgatactcgtcgctacgcggaggaagagcgcgacatgctgctcgacaaccatggtctctacgacctgaaaaagggcatttttctgagtgcggacagcgaagaagagattttcggtcatctggacctggattatctggagccgtgggaacgcaacgcg

SEQ ID NO: 6182 - protein, 394 aa, synthetic construct
  REGION 1..394: note = Variant of terminal deoxynucleotidyl transferase
MHHHHHHGGSGHPEGNTPEKEVPSVIARHVSPYACQRKTTLNNYNKKITDALEIMAENYKFKENLQARLEARRAASVLKSLPFEVTSMKDIQGLPCITDDVRPVIEEIIEVGESSRVKEILNDERYKAFKQFTSVFGVGVKTAEKWYRMGLRTLEEVKASKFLKLNKMQKAGFLYYEDLASGVSKEEADAVLDIVKETVWTVDPDALVTIAGGFRRGKPQGHDVDLLITIPGRPTDPELLHKVVDLLKKQGLLLYGDIRERTFVEGQLPNPKPDQLDNHQKCFAILKLYRPKVDNSAVGTSKKVDMAEVKDWKAVRVDLVVAPDEQFAYAKLGWTGSGMFRRDTRRYAEEERDMLLDNHGLYDLKKGIFLSADSEEEIFGHLDLDYLEPWERNA

SEQ ID NO: 6183 - DNA, 1182 bp, synthetic construct
  misc_feature 1..1182: note = Variant of terminal deoxynucleotidyl transferase
  source 1..1182: mol_type = other DNA
atgcaccatcatcaccatcacgggggctccggccatccggaaggtaataccccggagaaggaggtgccgagcgttatcgcccgtcatgttagtccgtacgcgtgccagcgcaagaccacgctgaataactacaacaaaaagatcaccgacgcgctggagatcatggccgagaactacaagtttaaagagaacctgcaggcgcgcctggaggcccgtcgcgccgcgagtgtcctgaaaagcctgccgttcgaggttaccagcatgaaagacatccaaggtctgccgtgcattaccgacgacgtacgtcctgtgatcgaagagatcatcgaagtaggcgagagcagccgtgttaaagaaatcctcaatgacgagcgctacaaggcctttaagcagttcaccagcgtgttcggtgtgggcgtcaagaccgcggaaaagtggtaccgtatgggcctccgtacgctggaagaagtaaaggccagtaagttcctgaagctgaacaagatgcagaaggcgggcttcctgtactacgaggatctggcgagcggtgttacgaaagaagaagcggatgccgttctggatatcgtgaaggaaacggtgcgcactgttagtccggatccgctggtgaccatcgcaggcggtttccgccgtggcaaacctcagggccacgacgttgacctgctgatcacgattccgggccgtcctacggatccggagctgctccacaacgtggttgatctgctcaagaagcaaggtctgctgctgtacggggacatccgtgagcgtacgttcgtggaggggcaactgccaaatcctaaacctgaccagctggacaatcatcagaagtgcttcgccattctcaagctgtacaatccgaaggtggataacagttttgttgggacgtcgaagaaagtcgacatggctgaggttaaggattggaaagcggttcgtgtggatctggtggtcgctccagatgagcagttcgcctatgcgaaactcggttggacgggcagcggcatgtttcgtcgcgatactcgtcgctacgcggaggaagagcgcgacatgctgctcgacaaccatggtctctacgacctgaaaaagggcatttttctgagtgcggacagcgaagaagagattttcggtcatctggacctggattatctggagccgtgggaacgcaacgcg

SEQ ID NO: 6184 - protein, 394 aa, synthetic construct
  REGION 1..394: note = Variant of terminal deoxynucleotidyl transferase
MHHHHHHGGSGHPEGNTPEKEVPSVIARHVSPYACQRKTTLNNYNKKITDALEIMAENYKFKENLQARLEARRAASVLKSLPFEVTSMKDIQGLPCITDDVRPVIEEIIEVGESSRVKEILNDERYKAFKQFTSVFGVGVKTAEKWYRMGLRTLEEVKASKFLKLNKMQKAGFLYYEDLASGVTKEEADAVLDIVKETVRTVSPDPLVTIAGGFRRGKPQGHDVDLLITIPGRPTDPELLHNVVDLLKKQGLLLYGDIRERTFVEGQLPNPKPDQLDNHQKCFAILKLYNPKVDNSFVGTSKKVDMAEVKDWKAVRVDLVVAPDEQFAYAKLGWTGSGMFRRDTRRYAEEERDMLLDNHGLYDLKKGIFLSADSEEEIFGHLDLDYLEPWERNA

SEQ ID NO: 6185 - DNA, 1182 bp, synthetic construct
  misc_feature 1..1182: note = Variant of terminal deoxynucleotidyl transferase
  source 1..1182: mol_type = other DNA
atgcaccatcatcaccatcacgggggctccggccatccggaaggtaataccccggagaaggaggtgccgagcgttatcgcccgtcatgttagtccgtacgcgtgccagcgcaagaccacgctgaataactacaacaaaaagatcaccgacgcgctggagatcatggccgagaactacaagtttaaagagaacctgcaggcgcgcctggaggcccgtcgcgccgcgagtgtcctgaaaagcctgccgttcgaggttaccagcatgaaagacatccaaggtctgccgtgcattaccgacgacgtacgtcctgtgatcgaagagatcatcgaagtaggcgagagcagccgtgttaaagaaatcctcaatgacgagcgctacaaggcctttaagcagttcaccagcgtgttcggtgtgggcgtcaagaccgcggaaaagtggtaccgtatgggcctccgtacgctggaagaagtaaaggccagtaagttcctgaagctgaacaagatgcagaaggcgggcttcctgtactacgaggatctggcgagcggtgtttcgaaagaagaagcggatgccgttctggatatcgtgaaggaaacggtgcgcactgttagtccggatgcgctggtgaccatcgtgggcggtttccgccgtggcaaacctcagggccacgacgttgacctgctgatcacgattccgggccgtcctacggatccggagctgctccacaaagtggttgatctgctcaagaagcaaggtctgctgctgtacggggacatccgtgagcgtacgttcgtggaggggcaactgccaaatcctaaacctgaccagctggacaatcatcagaagtgcttcgccattctcaagctgtaccgtccgaaggtggataacagtgcggttgggacgtcgaagaaagtcgacatggctgaggttaaggattggaaagcggttcgtgtggatctggtggtcgctccagatgagcagttcgcctatgcgaaactcggttggacgggcagcggcatgtttcgtcgcgatactcgtcgctacgcggaggaagagcgcgacatgctgctcgacaaccatggtctctacgacctgaaaaagggcatttttctgagtgcggacagcgaagaagagattttcggtcatctggacctggattatctggagccgtgggaacgcaacgcg

SEQ ID NO: 6186 - protein, 394 aa, synthetic construct
  REGION 1..394: note = Variant of terminal deoxynucleotidyl transferase
MHHHHHHGGSGHPEGNTPEKEVPSVIARHVSPYACQRKTTLNNYNKKITDALEIMAENYKFKENLQARLEARRAASVLKSLPFEVTSMKDIQGLPCITDDVRPVIEEIIEVGESSRVKEILNDERYKAFKQFTSVFGVGVKTAEKWYRMGLRTLEEVKASKFLKLNKMQKAGFLYYEDLASGVSKEEADAVLDIVKETVRTVSPDALVTIVGGFRRGKPQGHDVDLLITIPGRPTDPELLHKVVDLLKKQGLLLYGDIRERTFVEGQLPNPKPDQLDNHQKCFAILKLYRPKVDNSAVGTSKKVDMAEVKDWKAVRVDLVVAPDEQFAYAKLGWTGSGMFRRDTRRYAEEERDMLLDNHGLYDLKKGIFLSADSEEEIFGHLDLDYLEPWERNA

SEQ ID NO: 6187 - DNA, 1182 bp, synthetic construct
  misc_feature 1..1182: note = Variant of terminal deoxynucleotidyl transferase
  source 1..1182: mol_type = other DNA
atgcaccatcatcaccatcacgggggctccggccatccggaaggtaataccccggagaaggaggtgccgagcgttatcgcccgtcatgttagtccgtacgcgtgccagcgcaagaccacgctgaataactacaacaaaaagatcaccgacgcgctggagatcatggccgagaactacaagtttaaagagaacctgcaggcgcgcctggaggcccgtcgcgccgcgagtgtcctgaaaagcctgccgttcgaggttaccagcatgaaagacatccaaggtctgccgtgcattaccgacgacgtacgtcctgtgatcgaagagatcatcgaagtaggcgagagcagccgtgttaaagaaatcctcaatgacgagcgctacaaggcctttaagcagttcaccagcgtgttcggtgtgggcgtcaagaccgcggaaaagtggtaccgtatgggcctccgtacgctggaagaagtaaaggccagtaagttcctgaagctgaacaagatgcagaaggcgggcttcctgtactacgaggatctggcgagcggtgttacgaaagaagaagcggctgccgttctggatatcgtgaaggaaacggtgcgcactgttagtccggatgcgctggtgaccatcgccggcggtttccgccgtggcaaacctcagggccacgacgttgacctgctgatcacgattccgggccgtcctacggatccggagctgctccacaaagtggttgatctgctcaagaagcaaggtctgctgctgtacggggacatccgtgagcgtacgttcgtggaggggcaactgccaaatcctaaacctgaccagctggacaatcatcagaagtgcttcgccattctcaagctgtaccgtccgaaggtggataacagttttgttgggacgtcgaagaaagtcgacatggctgaggttaaggattggaaagcggttcgtgtggatctggtggtcgctccagatgagcagttcgcctatgcgaaactcggttggacgggcagcggcatgtttcgtcgcgatactcgtcgctacgcggaggaagagcgcgacatgctgctcgacaaccatggtctctacgacctgaaaaagggcatctttctgagtgcggacagcgaagaagagattttcggtcatctggacctggattatctggagccgtgggaacgcaacgcg

SEQ ID NO: 6188 - protein, 394 aa, synthetic construct
  REGION 1..394: note = Variant of terminal deoxynucleotidyl transferase
MHHHHHHGGSGHPEGNTPEKEVPSVIARHVSPYACQRKTTLNNYNKKITDALEIMAENYKFKENLQARLEARRAASVLKSLPFEVTSMKDIQGLPCITDDVRPVIEEIIEVGESSRVKEILNDERYKAFKQFTSVFGVGVKTAEKWYRMGLRTLEEVKASKFLKLNKMQKAGFLYYEDLASGVTKEEAAAVLDIVKETVRTVSPDALVTIAGGFRRGKPQGHDVDLLITIPGRPTDPELLHKVVDLLKKQGLLLYGDIRERTFVEGQLPNPKPDQLDNHQKCFAILKLYRPKVDNSFVGTSKKVDMAEVKDWKAVRVDLVVAPDEQFAYAKLGWTGSGMFRRDTRRYAEEERDMLLDNHGLYDLKKGIFLSADSEEEIFGHLDLDYLEPWERNA

SEQ ID NO: 6189 - DNA, 1182 bp, synthetic construct
  misc_feature 1..1182: note = Variant of terminal deoxynucleotidyl transferase
  source 1..1182: mol_type = other DNA
atgcaccatcatcaccatcacgggggctccggccatccggaaggtaataccccggagaaggaggtgccgagcgttatcgcccgtcatgttagtccgtacgcgtgccagcgcaagaccacgctgaataactacaacaaaaagatcaccgacgcgctggaaatcatggccgagaactacaagtttaaagagaacctgcaggcgcgcctggaggcccgtcgcgccgcgagtgtcctgaaaagcctgccgttcgaggttaccagcatgaaagacatccaaggtctgccgtgcattaccgacgacgtacgtcctgtgatcgaagagatcatcgaagtaggcgagagcagccgtgttaaagaaatcctcaatgacgagcgctacaaggcctttaagcagttcaccagcgtgttcggtgtgggcgtcaagaccgcggaaaagtggtaccgtatgggcctccgtacgctggaagaagtaaaggccagtaagttcctgaagctgaacaagatgcagaaggcgggcttcctgtactacgaggatctggcgagcggtgttacgaaagaagaagcggctgccgttctggatatcgtgaaggaaacggtgcgtactgtttcgccggatgctctggtgaccatcgccggcggtttccgccgtggcaaacctcagggccacgacgttgacctgctgatcacgattccgggccgtcctacggatccggagctgctccacaaagtggttgatctgctcaagaagcaaggtctgctgctgtacggggacatccgtgagcgtacgttcgtggaggggcaactgccaaatcctaaacctgaccagctggacaatcatcagaagtgcttcgccattctcaagctgtaccgcccgaaggtggataacagtgcggttgggacgtcgaagaaagtcgacatggctgaggttaaggattggaaagcggttcgtgtggatctggtggtcgctccagatgagcagttcgcctatgcgaaactcggttggacgggcagcggcatgtttcgtcgcgatactcgtcgctacgcggaggaagagcgcgacatgctgctcgacaaccatggtctctacgacctgaaaaagggcatctttctgagtgcggacagcgaagaagagattttcggtcatctggacctggattatctggagccgtgggaacgcaacgcg

SEQ ID NO: 6190 - protein, 394 aa, synthetic construct
  REGION 1..394: note = Variant of terminal deoxynucleotidyl transferase
MHHHHHHGGSGHPEGNTPEKEVPSVIARHVSPYACQRKTTLNNYNKKITDALEIMAENYKFKENLQARLEARRAASVLKSLPFEVTSMKDIQGLPCITDDVRPVIEEIIEVGESSRVKEILNDERYKAFKQFTSVFGVGVKTAEKWYRMGLRTLEEVKASKFLKLNKMQKAGFLYYEDLASGVTKEEAAAVLDIVKETVRTVSPDALVTIAGGFRRGKPQGHDVDLLITIPGRPTDPELLHKVVDLLKKQGLLLYGDIRERTFVEGQLPNPKPDQLDNHQKCFAILKLYRPKVDNSAVGTSKKVDMAEVKDWKAVRVDLVVAPDEQFAYAKLGWTGSGMFRRDTRRYAEEERDMLLDNHGLYDLKKGIFLSADSEEEIFGHLDLDYLEPWERNA

SEQ ID NO: 6191 - DNA, 1182 bp, synthetic construct
  misc_feature 1..1182: note = Variant of terminal deoxynucleotidyl transferase
  source 1..1182: mol_type = other DNA
atgcaccatcatcaccatcacgggggctccggccatccggaaggtaataccccggagaaggaggtgccgagcgttatcgcccgtcatgttagtccgtacgcgtgccagcgcaagaccacgctgaataactacaacaaaaagatcaccgacgcgctggagatcatggccgagaactacaagtttaaagagaacctgcaggcgcgcctggaggcccgtcgcgccgcgagtgtcctgaaaagcctgccgttcgaggttaccagcatgaaagacatccaaggtctgccgtgcattaccgacgacgtacgtcctgtgatcgaagagatcatcgaagtaggcgagagcagccgtgttaaagaaatcctcaatgacgagcgctacaaggcctttaagcagttcaccagcgtgttcggtgtgggcgtcaagaccgcggaaaagtggtaccgtatgggcctccgtacgctggaagaagtaaaggccagtaagttcctgaagctgaacaagatgcagaaggcgggcttcctgtactacgaggatctggcgagcggtgttacgaaagaagaagcggatgccgttctggatattgtgaaggaaacggtgcgcactgttagtccggatgcgctggtgaccatcgccggcggtttccgccgtggcaaacctcagggccacgacgttgacctgctgatcacgattccgggccgtcctacggatccggagctgctccacaaggtggttgatctgctcaagaagcaaggtctgctgctgtacggggacatccgtgagcgtacgttcgtggaggggcaactgccaaatcctaaacctgaccagctggacaatcatcagaagtgcttcgccattctcaagctgtacaatccgaaggtggataacagttttgttgggacgtcgaagaaagtcgacatggctgaggttaaggattggaaagcggttcgtgtggatctggtggtcgctccagatgagcagttcgcctatgcgaaactcggttggacgggcagcggcatgtttcgtcgcgatactcgtcgctacgcggaggaagagcgcgacatgctgctcgacaaccatggtctctacgacctgaaaaagggcatttttctgagtgcggacagcgaagaagagattttcggtcatctggacctggattatctggagccgtgggaacgcaacgcg

SEQ ID NO: 6192 - protein, 394 aa, synthetic construct
  REGION 1..394: note = Variant of terminal deoxynucleotidyl transferase
MHHHHHHGGSGHPEGNTPEKEVPSVIARHVSPYACQRKTTLNNYNKKITDALEIMAENYKFKENLQARLEARRAASVLKSLPFEVTSMKDIQGLPCITDDVRPVIEEIIEVGESSRVKEILNDERYKAFKQFTSVFGVGVKTAEKWYRMGLRTLEEVKASKFLKLNKMQKAGFLYYEDLASGVTKEEADAVLDIVKETVRTVSPDALVTIAGGFRRGKPQGHDVDLLITIPGRPTDPELLHKVVDLLKKQGLLLYGDIRERTFVEGQLPNPKPDQLDNHQKCFAILKLYNPKVDNSFVGTSKKVDMAEVKDWKAVRVDLVVAPDEQFAYAKLGWTGSGMFRRDTRRYAEEERDMLLDNHGLYDLKKGIFLSADSEEEIFGHLDLDYLEPWERNA

SEQ ID NO: 6193 - DNA, 1182 bp, synthetic construct
  misc_feature 1..1182: note = Variant of terminal deoxynucleotidyl transferase
  source 1..1182: mol_type = other DNA
atgcaccatcatcaccatcacgggggctccggccatccggaaggtaataccccggagaaggaggtgccgagcgttatcgcccgtcatgttagtccgtacgcgtgccagcgcaagaccacgctgaataactacaacaaaaagatcaccgacgcgctggagatcatggccgagaactacaagtttaaagagaacctgcaggcgcgcctggaggcccgtcgcgccgcgagtgtcctgaaaagcctgccgttcgaggttaccagcatgaaagacatccaaggtctgccgtgcattaccgacgacgtacgtcctgtgatcgaagagatcatcgaagtaggcgagagcagccgtgttaaagaaatcctcaatgacgagcgctacaaggcctttaagcagttcaccagcgtgttcggtgtgggcgtcaagaccgcggaaaagtggtaccgtatgggcctccgtacgctggaagaagtaaaggccagtaagttcctgaagctgaacaagatgcagaaggcgggcttcctgtactacgaggatctggcgagcggtgttagtaaagaagaagccgatgccgttctgggttttgtgaaggaaacggtgcgtactgtttcgccggatgctctggtgaccatcgccggcggtttccgccgtggcaaacctcagggccacgacgttgacctgctgatcacgattccgggccgtcctacggatccggagctgctccacaaggtggttgatctgctcaagaagcaaggtctgctgctgtacggggacatccgtgagcgtacgttcgtggaggggcaactgccaaatcctaaacctgaccagctggacaatcatcagaagtgcttcgccattctcaagctgtaccgcccgaaggtggataacagtgcggttgggacgtcgaagaaagtcgacatggctgaggttaaggattggaaagcggttcgtgtggatctggtggtcgctccagatgagcagttcgcctatgcgaaactcggttggacgggcagcggcatgtttcgtcgcgatactcgtcgctacgcggaggaagagcgcgacatgctgctcgacaaccatggtctctacgacctgaaaaagggcatttttctgagtgcggacagcgaagaagagattttcggtcatctggacctggattatctggagccgtgggaacgcaacgcg

SEQ ID NO: 6194 - protein, 394 aa, synthetic construct
  REGION 1..394: note = Variant of terminal deoxynucleotidyl transferase
MHHHHHHGGSGHPEGNTPEKEVPSVIARHVSPYACQRKTTLNNYNKKITDALEIMAENYKFKENLQARLEARRAASVLKSLPFEVTSMKDIQGLPCITDDVRPVIEEIIEVGESSRVKEILNDERYKAFKQFTSVFGVGVKTAEKWYRMGLRTLEEVKASKFLKLNKMQKAGFLYYEDLASGVSKEEADAVLGFVKETVRTVSPDALVTIAGGFRRGKPQGHDVDLLITIPGRPTDPELLHKVVDLLKKQGLLLYGDIRERTFVEGQLPNPKPDQLDNHQKCFAILKLYRPKVDNSAVGTSKKVDMAEVKDWKAVRVDLVVAPDEQFAYAKLGWTGSGMFRRDTRRYAEEERDMLLDNHGLYDLKKGIFLSADSEEEIFGHLDLDYLEPWERNA

SEQ ID NO: 6195 - DNA, 1182 bp, synthetic construct
  misc_feature 1..1182: note = Variant of terminal deoxynucleotidyl transferase
  source 1..1182: mol_type = other DNA
atgcaccatcatcaccatcacgggggctccggccatccggaaggtaataccccggagaaggaggtgccgagcgttatcgcccgtcatgttagtccgtacgcgtgccagcgcaagaccacgctgaataactacaacaaaaagatcaccgacgcgctggagatcatggccgagaactacaagtttaaagagaacctgcaggcgcgcctggaggcccgtcgcgccgcgagtgtcctgaaaagcctgccgttcgaggttaccagcatgaaagacatccaaggtctgccgtgcattaccgacgacgtacgtcctgtgatcgaagagatcatcgaagtaggcgagagcagccgtgttaaagaaatcctcaatgacgagcgctacaaggcctttaagcagttcaccagcgtgttcggtgtgggcgtcaagaccgcggaaaagtggtaccgtatgggcctccgtacgctggaagaagtaaaggccagtaagttcctgaagctgaacaagatgcagaaggcgggcttcctgtactacgaggatctggcgagcggtgtttcgaaagaagaagcggatgccgttctggatatcgtgaaggaaacggtgtggactgtttcgccggatgctctggtgaccatcgccggcggtttccgccgtggcaaacctcagggccacgacgttgacctgctgatcacgattccgggccgtcctacggatccggagctgctccacaaagtggttgatctgctcaagaagcaaggtctgctgctgtacggggacatccgtgagcgtacgttcgtggaggggcaactgccaaatcctaaacctgaccagctggacaatcatcagaagtgcttcgccattctcaagctgtaccgtccgaaggtggataacagtgcggttgggacgtcgaagaaagtcgacatggctgaggttaaggattggaaagcggttcgtgtggatctggtggtcgctccagatgagcagttcgcctatgcgaaactcggttggacgggcagcggcatgtttcgtcgcgatactcgtcgctacgcggaggaagagcgcgacatgctgctcgacaaccatggtctctacgacctgaaaaagggcatttttctgagtgcggacagcgaagaagagattttcggtcatctggacctggattatctggagccgtgggaacgcaacgcg

SEQ ID NO: 6196 - protein, 394 aa, synthetic construct
  REGION 1..394: note = Variant of terminal deoxynucleotidyl transferase
MHHHHHHGGSGHPEGNTPEKEVPSVIARHVSPYACQRKTTLNNYNKKITDALEIMAENYKFKENLQARLEARRAASVLKSLPFEVTSMKDIQGLPCITDDVRPVIEEIIEVGESSRVKEILNDERYKAFKQFTSVFGVGVKTAEKWYRMGLRTLEEVKASKFLKLNKMQKAGFLYYEDLASGVSKEEADAVLDIVKETVWTVSPDALVTIAGGFRRGKPQGHDVDLLITIPGRPTDPELLHKVVDLLKKQGLLLYGDIRERTFVEGQLPNPKPDQLDNHQKCFAILKLYRPKVDNSAVGTSKKVDMAEVKDWKAVRVDLVVAPDEQFAYAKLGWTGSGMFRRDTRRYAEEERDMLLDNHGLYDLKKGIFLSADSEEEIFGHLDLDYLEPWERNA

SEQ ID NO: 6197 - DNA, 1182 bp, synthetic construct
  misc_feature 1..1182: note = Variant of terminal deoxynucleotidyl transferase
  source 1..1182: mol_type = other DNA
atgcaccatcatcaccatcacgggggctccggccatccggaaggtaataccccggagaaggaggtgccgagcgttatcgcccgtcatgttagtccgtacgcgtgccagcgcaagaccacgctgaataactacaacaaaaagatcaccgacgcgctggagatcatggccgagaactacaagtttaaagagaacctgcaggcgcgcctggaggcccgtcgcgccgcgagtgtcctgaaaagcctgccgttcgaggttaccagcatgaaagacatccaaggtctgccgtgcattaccgacgacgtacgtcctgtgatcgaagagatcatcgaagtaggcgagagcagccgtgttaaagaaatcctcaatgacgagcgctacaaggcctttaagcagttcaccagcgtgttcggtgtgggcgtcaagaccgcggaaaagtggtaccgtatgggcctccgtacgctggaagaagtaaaggccagtaagttcctgaagctgaacaagatgcagaaggcgggcttcctgtactacgaggatctggcgagcggtgttagtaaagaagaagccgatgccgttctggatatcgtgaaggaaacggtgcgcactgttagtccggatgcgctggtgaccatcgcaggcggtttccgccgtggcaaacctcagggccacgacgttgacctgctgatcacgattccgggccgtcctacggatccggagctgctccacaaagtggttgatctgctcaagaagcaaggtctgctgctgtacggggacatccgtgagcgtacgttcgtggaggggcaactgccaaatcctaaacctgaccagctggacaatcatcagaagtgcttcgccattctcaagctgtaccgcccgaaggtggataacagttttgttgggacgtcgaagaaagtcgacatggctgaggttaaggattggaaagcggttcgtgtggatctggtggtcgctccagatgagcagttcgcctatgcgaaactcggttggacgggcagcggcatgtttcgtcgcgatactcgtcgctacgcggaggaagagcgcgacatgctgctcgacaaccatggtctctacgacctgaaaaagggcatctttctgagtgcggacagcgaagaagagattttcggtcatctggacctggattatctggagccgtgggaacgcaacgcg

SEQ ID NO: 6198 - protein, 394 aa, synthetic construct; identical to SEQ ID NO: 6156
  REGION 1..394: note = Variant of terminal deoxynucleotidyl transferase

SEQ ID NO: 6199 - DNA, 1182 bp, synthetic construct
  misc_feature 1..1182: note = Variant of terminal deoxynucleotidyl transferase
  source 1..1182: mol_type = other DNA
atgcaccatcatcaccatcacgggggctccggccatccggaaggtaataccccggagaaggaggtgccgagcgttatcgcccgtcatgttagtccgtacgcgtgccagcgcaagaccacgctgaataactacaacaaaaagatcaccgacgcgctggagatcatggccgagaactacaagtttaaagagaacctgcaggcgcgcctggaggcccgtcgcgccgcgagtgtcctgaaaagcctgccgttcgaggttaccagcatgaaagacatccaaggtctgccgtgcattaccgacgacgtacgtcctgtgatcgaagagatcatcgaagtaggcgagagcagccgtgttaaagaaatcctcaatgacgagcgctacaaggcctttaagcagttcaccagcgtgttcggtgtgggcgtcaagaccgcggaaaagtggtaccgtatgggcctccgtacgctggaagaagtaaaggccagtaagttcctgaagctgaacaagatgcagaaggcgggcttcctgtactacgaggatctggcgagcggtgtttcgaaagaagaagcggatgccgttctggatatcgtgaaggaaacggtgcgcactgttagtccggatccgctggtgaccatcgcaggcggtttccgccgtggcaaacctcagggccacgacgttgacctgctgatcacgattccgggccgtcctacggatccggagctgctccacaaggtggttgatctgctcaagaagcaaggtctgctgctgtacggggacatccgtgagcgtacgttcgtggaggggcaactgccaaatcctaaacctgaccagctggacaatcatcagaagtgcttcgccattctcaagctgtaccgcccgaaggtggataacagttttgttgggacgtcgaagaaagtcgacatggctgaggttaaggattggaaagcggttcgtgtggatctggtggtcgctccagatgagcagttcgcctatgcgaaactcggttggacgggcagcggcatgtttcgtcgcgatactcgtcgctacgcggaggaagagcgcgacatgctgctcgacaaccatggtctctacgacctgaaaaagggcatttttctgagtgcggacagcgaagaagagattttcggtcatctggacctggattatctggagccgtgggaacgcaacgcg

SEQ ID NO: 6200 - protein, 394 aa, synthetic construct
  REGION 1..394: note = Variant of terminal deoxynucleotidyl transferase
MHHHHHHGGSGHPEGNTPEKEVPSVIARHVSPYACQRKTTLNNYNKKITDALEIMAENYKFKENLQARLEARRAASVLKSLPFEVTSMKDIQGLPCITDDVRPVIEEIIEVGESSRVKEILNDERYKAFKQFTSVFGVGVKTAEKWYRMGLRTLEEVKASKFLKLNKMQKAGFLYYEDLASGVSKEEADAVLDIVKETVRTVSPDPLVTIAGGFRRGKPQGHDVDLLITIPGRPTDPELLHKVVDLLKKQGLLLYGDIRERTFVEGQLPNPKPDQLDNHQKCFAILKLYRPKVDNSFVGTSKKVDMAEVKDWKAVRVDLVVAPDEQFAYAKLGWTGSGMFRRDTRRYAEEERDMLLDNHGLYDLKKGIFLSADSEEEIFGHLDLDYLEPWERNA

SEQ ID NO: 6201 - DNA, 1182 bp, synthetic construct
  misc_feature 1..1182: note = Variant of terminal deoxynucleotidyl transferase
  source 1..1182: mol_type = other DNA
atgcaccatcatcaccatcacgggggctccggccatccggaaggtaataccccggagaaggaggtgccgagcgttatcgcccgtcatgttagtccgtacgcgtgccagcgcaagaccacgctgaataactacaacaaaaagatcaccgacgcgctggagatcatggccgagaactacaagtttaaagagaacctgcaggcgcgcctggaggcccgtcgcgccgcgagtgtcctgaaaagcctgccgttcgaggttaccagcatgaaagacatccaaggtctgccgtgcattaccgacgacgtacgtcctgtgatcgaagagatcatcgaagtaggcgagagcagccgtgttaaagaaatcctcaatgacgagcgctacaaggcctttaagcagttcaccagcgtgttcggtgtgggcgtcaagaccgcggaaaagtggtaccgtatgggcctccgtacgctggaagaagtaaaggccagtaagttcctgaagctgaacaagatgcagaaggcgggcttcctgtactacgaggatctggcgagcggtgttacgaaagaagaagcggatgccgttctggatatcgtgaaggaaacggtgcgcactgttagtccggatgcgctggtgaccatcgccggcggtttccgccgtggcaaacctcagggccacgacgttgacctgctgatcacgattccgggccgtcctacggatccggagctgctccacaaggtggttgatctgctcaagaagcaaggtctgctgctgtacggggacatccgtgagcgtacgttcgtggaggggcaactgccaaatcctaaacctgaccagctggacaatcatcagaagtgcttcgccattctcaagctgtaccgcccgaaggtggataacagtgcggttgggacgtcgaagaaagtcgacatggctgaggttaaggattggaaagcggttcgtgtggatctggtggtcgctccagatgagcagttcgcctatgcgaaactcggttggacgggcagcggcatgtttcgtcgcgatactcgtcgctacgcggaggaagagcgcgacatgctgctcgacaaccatggtctctacgacctgaaaaagggcatttttctgagtgcggacagcgaagaagagattttcggtcatctggacctggattatctggagccgtgggaacgcaacgcg

SEQ ID NO: 6202 - protein, 394 aa, synthetic construct
  REGION 1..394: note = Variant of terminal deoxynucleotidyl transferase
MHHHHHHGGSGHPEGNTPEKEVPSVIARHVSPYACQRKTTLNNYNKKITDALEIMAENYKFKENLQARLEARRAASVLKSLPFEVTSMKDIQGLPCITDDVRPVIEEIIEVGESSRVKEILNDERYKAFKQFTSVFGVGVKTAEKWYRMGLRTLEEVKASKFLKLNKMQKAGFLYYEDLASGVTKEEADAVLDIVKETVRTVSPDALVTIAGGFRRGKPQGHDVDLLITIPGRPTDPELLHKVVDLLKKQGLLLYGDIRERTFVEGQLPNPKPDQLDNHQKCFAILKLYRPKVDNSAVGTSKKVDMAEVKDWKAVRVDLVVAPDEQFAYAKLGWTGSGMFRRDTRRYAEEERDMLLDNHGLYDLKKGIFLSADSEEEIFGHLDLDYLEPWERNA

SEQ ID NO: 6203 - DNA, 1182 bp, synthetic construct
  misc_feature 1..1182: note = Variant of terminal deoxynucleotidyl transferase
  source 1..1182: mol_type = other DNA
atgcaccatcatcaccatcacgggggctccggccatccggaaggtaataccccggagaaggaggtgccgagcgttatcgcccgtcatgttagtccgtacgcgtgccagcgcaagaccacgctgaataactacaacaaaaagatcaccgacgcgctggaaatcatggccgagaactacaagtttaaagagaacctgcaggcgcgcctggaggcccgtcgcgccgcgagtgtcctgaaaagcctgccgttcgaggttaccagcatgaaagacatccaaggtctgccgtgcattaccgacgacgtacgtcctgtgatcgaagagatcatcgaagtaggcgagagcagccgtgttaaagaaatcctcaatgacgagcgctacaaggcctttaagcagttcaccagcgtgttcggtgtgggcgtcaagaccgcggaaaagtggtaccgtatgggcctccgtacgctggaagaagtaaaggccagtaagttcctgaagctgaacaagatgcagaaggcgggcttcctgtactacgaggatctggcgagcggtgtttcgaaagaagaagcggctgccgttctggatatcgtgaaggaaacggtgtggactgtttcgccggatgctctggtgaccatcgccggcggtttccgccgtggcaaacctcagggccacgacgttgacctgctgatcacgattccgggccgtcctacggatccggagctgctccacaaggtggttgatctgctcaagaagcaaggtctgctgctgtacggggacatccgtgagcgtacgttcgtggaggggcaactgccaaatcctaaacctgaccagctggacaatcatcagaagtgcttcgccattctcaagctgtaccgtccgaaggtggataacagtgcggttgggacgtcgaagaaagtcgacatggctgaggttaaggattggaaagcggttcgtgtggatctggtggtcgctccagatgagcagttcgcctatgcgaaactcggttggacgggcagcggcatgtttcgtcgcgatactcgtcgctacgcggaggaagagcgcgacatgctgctcgacaaccatggtctctacgacctgaaaaagggcatttttctgagtgcggacagcgaagaagagattttcggtcatctggacctggattatctggagccgtgggaacgcaacgcg

SEQ ID NO: 6204 - protein, 394 aa, synthetic construct
  REGION 1..394: note = Variant of terminal deoxynucleotidyl transferase
MHHHHHHGGSGHPEGNTPEKEVPSVIARHVSPYACQRKTTLNNYNKKITDALEIMAENYKFKENLQARLEARRAASVLKSLPFEVTSMKDIQGLPCITDDVRPVIEEIIEVGESSRVKEILNDERYKAFKQFTSVFGVGVKTAEKWYRMGLRTLEEVKASKFLKLNKMQKAGFLYYEDLASGVSKEEAAAVLDIVKETVWTVSPDALVTIAGGFRRGKPQGHDVDLLITIPGRPTDPELLHKVVDLLKKQGLLLYGDIRERTFVEGQLPNPKPDQLDNHQKCFAILKLYRPKVDNSAVGTSKKVDMAEVKDWKAVRVDLVVAPDEQFAYAKLGWTGSGMFRRDTRRYAEEERDMLLDNHGLYDLKKGIFLSADSEEEIFGHLDLDYLEPWERNA

SEQ ID NO: 6205 - DNA, 1182 bp, synthetic construct
  misc_feature 1..1182: note = Variant of terminal deoxynucleotidyl transferase
  source 1..1182: mol_type = other DNA
atgcaccatcatcaccatcacgggggctccggccatccggaaggtaataccccggagaaggaggtgccgagcgttatcgcccgtcatgttagtccgtacgcgtgccagcgcaagaccacgctgaataactacaacaaaaagatcaccgacgcgctggagatcatggccgagaactacaagtttaaagagaacctgcaggcgcgcctggaggcccgtcgcgccgcgagtgtcctgaaaagcctgccgttcgaggttaccagcatgaaagacatccaaggtctgccgtgcattaccgacgacgtacgtcctgtgatcgaagagatcatcgaagtaggcgagagcagccgtgttaaagaaatcctcaatgacgagcgctacaaggcctttaagcagttcaccagcgtgttcggtgtgggcgtcaagaccgcggaaaagtggtaccgtatgggcctccgtacgctggaagaagtaaaggccagtaagttcctgaagctgaacaagatgcagaaggcgggcttcctgtactacgaggatctggcgagcggtgttacgaaagaagaagcggctgccgttctggatatcgtgaaggaaacggtgcgcactgttagtccggatgcgctggtgaccatcgccggcggtttccgccgtggcaaacctcagggccacgacgttgacctgctgatcacgattccgggccgtcctacggatccggagctgctccacaaggtggttgatctgctcaagaagcaaggtctgctgctgtacggggacatccgtgagcgtacgttcgtggaggggcaactgccaaatcctaaacctgaccagctggacaatcatcagaagtgcttcgccattctcaagctgtaccgtccgaaggtggataacagtgcggttgggacgtcgaagaaagtcgacatggctgaggttaaggattggaaagcggttcgtgtggatctggtggtcgctccagatgagcagttcgcctatgcgaaactcggttggacgggcagcggcatgtttcgtcgcgatactcgtcgctacgcggaggaagagcgcgacatgctgctcgacaaccatggtctctacgacctgaaaaagggcatctttctgagtgcggacagcgaagaagagattttcggtcatctggacctggattatctggagccgtgggaacgcaacgcg

SEQ ID NO: 6206 - protein, 394 aa, synthetic construct; identical to SEQ ID NO: 6190
  REGION 1..394: note = Variant of terminal deoxynucleotidyl transferase

SEQ ID NO: 6207 - DNA, 1182 bp, synthetic construct
  misc_feature 1..1182: note = Variant of terminal deoxynucleotidyl transferase
  source 1..1182: mol_type = other DNA
atgcaccatcatcaccatcacgggggctccggccatccggaaggtaataccccggagaaggaggtgccgagcgttatcgcccgtcatgttagtccgtacgcgtgccagcgcaagaccacgctgaataactacaacaaaaagatcaccgacgcgctggagatcatggccgagaactacaagtttaaagagaacctgcaggcgcgcctggaggcccgtcgcgccgcgagtgtcctgaaaagcctgccgttcgaggttaccagcatgaaagacatccaaggtctgccgtgcattaccgacgacgtacgtcctgtgatcgaagagatcatcgaagtaggcgagagcagccgtgttaaagaaatcctcaatgacgagcgctacaaggcctttaagcagttcaccagcgtgttcggtgtgggcgtcaagaccgcggaaaagtggtaccgtatgggcctccgtacgctggaagaagtaaaggccagtaagttcctgaagctgaacaagatgcagaaggcgggcttcctgtactacgaggatctggcgagcggtgttacgaaagaagaaaaagatgccgttctggatatcgtgaaggaaacggtgtggactgttgatccggatgcgctggtggagatcgccggcggtttccgccgtggcaaacctcagggccacgacgttgacctgctgatcacgattccgggccgtcctacggatccggagctgctccacaacgtggttgatctgctcaagaagcaaggtctgctgctgtacggggacatccgtgagcgtacgttcgtggaggggcaactgccaaatcctaaacctgaccagctggacaatcatcagaagtgcttcgccattctcaagctgtaccgcccgaaggtggataacagtgcggttgggacgtcgaagaaagtcgacatggctgaggttaaggattggaaagcggttcgtgtggatctggtggtcgctccagatgagcagttcgcctatgcgaaactcggttggacgggcagcggcatgtttcgtcgcgatactcgtcgctacgcggaggaagagcgcgacatgctgctcgacaaccatggtctctacgacctgaaaaagggcatttttctgagtgcggacagcgaagaagagattttcggtcatctggacctggattatctggagccgtgggaacgcaacgcg

SEQ ID NO: 6208 - protein, 394 aa, synthetic construct
  REGION 1..394: note = Variant of terminal deoxynucleotidyl transferase
MHHHHHHGGSGHPEGNTPEKEVPSVIARHVSPYACQRKTTLNNYNKKITDALEIMAENYKFKENLQARLEARRAASVLKSLPFEVTSMKDIQGLPCITDDVRPVIEEIIEVGESSRVKEILNDERYKAFKQFTSVFGVGVKTAEKWYRMGLRTLEEVKASKFLKLNKMQKAGFLYYEDLASGVTKEEKDAVLDIVKETVWTVDPDALVEIAGGFRRGKPQGHDVDLLITIPGRPTDPELLHNVVDLLKKQGLLLYGDIRERTFVEGQLPNPKPDQLDNHQKCFAILKLYRPKVDNSAVGTSKKVDMAEVKDWKAVRVDLVVAPDEQFAYAKLGWTGSGMFRRDTRRYAEEERDMLLDNHGLYDLKKGIFLSADSEEEIFGHLDLDYLEPWERNA

SEQ ID NO: 6209 - DNA, 1182 bp, synthetic construct
  misc_feature 1..1182: note = Variant of terminal deoxynucleotidyl transferase
  source 1..1182: mol_type = other DNA
atgcaccatcatcaccatcacgggggctccggccatccggaaggtaataccccggagaaggaggtgccgagcgttatcgcccgtcatgttagtccgtacgcgtgccagcgcaagaccacgctgaataactacaacaaaaagatcaccgacgcgctggagatcatggccgagaactacaagtttaaagagaacctgcaggcgcgcctggaggcccgtcgcgccgcgagtgtcctgaaaagcctgccgttcgaggttaccagcatgaaagacatccaaggtctgccgtgcattaccgacgacgtacgtcctgtgatcgaagagatcatcgaagtaggcgagagcagccgtgttaaagaaatcctcaatgacgagcgctacaaggcctttaagcagttcaccagcgtgttcggtgtgggcgtcaagaccgcggaaaagtggtaccgtatgggcctccgtacgctggaagaagtaaaggccagtaagttcctgaagctgaacaagatgcagaaggcgggcttcctgtactacgaggatctggcgagcggtgttacgaaagaagaaaaagatgccgttctggatatcgtgaaggaaacggtgtggactgttgatccggatgcgctggtgaccatcgtgggcggtttccgccgtggcaaacctcagggccacgacgttgacctgctgatcacgattccgggccgtcctacggatccggagctgctccacaacgtggttgatctgctcaagaagcaaggtctgctgctgtacggggacatccgtgagcgtacgttcgtggaggggcaactgccaaatcctaatcctgaccagctggacaatcatcagaagtgcttcgccattctcaagctgtaccgcccgaaggtggataacagtgcggttgggacgtcgaagaaagtcgacatggctgaggttaaggattggaaagcggttcgtgtggatctggtggtcgctccagatgagcagttcgcctatgcgaaactcggttggacgggcagcggcatgtttcgtcgcgatactcgtcgctacgcggaggaagagcgcgacatgctgctcgacaaccatggtctctacgacctgaaaaagggcatttttctgagtgcggacagcgaagaagagattttcggtcatctggacctggattatctggagccgtgggaacgcaacgcg

SEQ ID NO: 6210 - protein, 394 aa, synthetic construct
  REGION 1..394: note = Variant of terminal deoxynucleotidyl transferase
MHHHHHHGGSGHPEGNTPEKEVPSVIARHVSPYACQRKTTLNNYNKKITDALEIMAENYKFKENLQARLEARRAASVLKSLPFEVTSMKDIQGLPCITDDVRPVIEEIIEVGESSRVKEILNDERYKAFKQFTSVFGVGVKTAEKWYRMGLRTLEEVKASKFLKLNKMQKAGFLYYEDLASGVTKEEKDAVLDIVKETVWTVDPDALVTIVGGFRRGKPQGHDVDLLITIPGRPTDPELLHNVVDLLKKQGLLLYGDIRERTFVEGQLPNPNPDQLDNHQKCFAILKLYRPKVDNSAVGTSKKVDMAEVKDWKAVRVDLVVAPDEQFAYAKLGWTGSGMFRRDTRRYAEEERDMLLDNHGLYDLKKGIFLSADSEEEIFGHLDLDYLEPWERNA

SEQ ID NO: 6211 - DNA, 1182 bp, synthetic construct
  misc_feature 1..1182: note = Variant of terminal deoxynucleotidyl transferase
  source 1..1182: mol_type = other DNA
atgcaccatcatcaccatcacgggggctccggccatccggaaggtaataccccggagaaggaggtgccgagcgttatcgcccgtcatgttagtccgtacgcgtgccagcgcaagaccacgctgaataactacaacaaaaagatcaccgacgcgctggagatcatggccgagaactacaagtttaaagagaacctgcaggcgcgcctggaggcccgtcgcgccgcgagtgtcctgaaaagcctgccgttcgaggttaccagcatgaaagacatccaaggtctgccgtgcattaccgacgacgtacgtcctgtgatcgaagagatcatcgaagtaggcgagagcagccgtgttaaagaaatcctcaatgacgagcgctacaaggcctttaagcagttcaccagcgtgttcggtgtgggcgtcaagaccgcggaaaagtggtaccgtatgggcctccgtacgctggaagaagtaaaggccagtaagttcctgaagctgaacaagatgcagaaggcgggcttcctgtactacgaggatctggcgagcggtgttacgaaagaagaaaaagatgccgttctggatatcgtgaaggaaacggtgtggactgttgatccggatgcgctggtgaccatcgtgggcggtttccgccgtggcaaacctcagggccacgacgttgacctgctgatcacgattccgggccgtcctacggatccggagctgctccacaacgtggttgatctgctcaagaagcaaggtctgctgctgtacggggacatccgtgagcgtacgttcgtggaggggcaactgccaaatcctgagcctgaccagctggacaatcatcagaagtgcttcgccattctcaagctgtaccgcccgaaggtggataacagtgcggttgggacgtcgaagaaagtcgacatggctgaggttaaggattggaaagcggttcgtgtggatctggtggtcgctccagatgagcagttcgcctatgcgaaactcggttggacgggcagcggcatgtttcgtcgcgatactcgtcgctacgcggaggaagagcgcgacatgctgctcgacaaccatggtctctacgacctgaaaaagggcatttttctgagtgcggacagcgaagaagagattttcggtcatctggacctggattatctggagccgtgggaacgcaacgcg

SEQ ID NO: 6212 - protein, 394 aa, synthetic construct
  REGION 1..394: note = Variant of terminal deoxynucleotidyl transferase
MHHHHHHGGSGHPEGNTPEKEVPSVIARHVSPYACQRKTTLNNYNKKITDALEIMAENYKFKENLQARLEARRAASVLKSLPFEVTSMKDIQGLPCITDDVRPVIEEIIEVGESSRVKEILNDERYKAFKQFTSVFGVGVKTAEKWYRMGLRTLEEVKASKFLKLNKMQKAGFLYYEDLASGVTKEEKDAVLDIVKETVWTVDPDALVTIVGGFRRGKPQGHDVDLLITIPGRPTDPELLHNVVDLLKKQGLLLYGDIRERTFVEGQLPNPEPDQLDNHQKCFAILKLYRPKVDNSAVGTSKKVDMAEVKDWKAVRVDLVVAPDEQFAYAKLGWTGSGMFRRDTRRYAEEERDMLLDNHGLYDLKKGIFLSADSEEEIFGHLDLDYLEPWERNA

SEQ ID NO: 6213 - DNA, 1179 bp, synthetic construct
  misc_feature 1..1179: note = Variant of terminal deoxynucleotidyl transferase
  source 1..1179: mol_type = other DNA
atgcaccatcatcaccatcacgggggctccggccatccggaaggtaataccccggagaaggaggtgccgagcgttatcgcccgtcatgttagtccgtacgcgtgccagcgcaagaccacgctgaataactacaacaaaaagatcaccgacgcgctggagatcatggccgagaactacaagtttaaagagaacctgcaggcgcgcctggaggcccgtcgcgccgcgagtgtcctgaaaagcctgccgttcgaggttaccagcatgaaagacatccaaggtctgccgtgcattaccgacgacgtacgtcctgtgatcgaagagatcatcgaagtaggcgagagcagccgtgttaaagaaatcctcaatgacgagcgctacaaggcctttaagcagttcaccagcgtgttcggtgtgggcgtcaagaccgcggaaaagtggtaccgtatgggcctccgtacgctggaagaagtaaaggccagtaagttcctgaagctgaacaagatgcagaaggcgggcttcctgtactacgaggatctggcgagcggtgttacgaaagaagaaaaagatgccgttctggatatcgtgaaggaaacggtgtggactgttgatccggatgcgctggtgaccatcgtgggcggtttccgccgtggcaaacctcagggccacgacgttgacctgctgatcacgattccgggccgtcctacggatccggagctgctccacaacgtggttgatctgctcaagaagcaaggtctgctgctgtacggggacatccgtgagcgtacgttcgtggaggggcaactgccaaatcctaaagaccagctggacaatcatcagaagtgcttcgccattctcaagctgtaccgcccgaaggtggataacagtgcggttgggacgtcgaagaaagtcgacatggctgaggttaaggattggaaagcggttcgtgtggatctggtggtcgctccagatgagcagttcgcctatgcgaaactcggttggacgggcagcggcatgtttcgtcgcgatactcgtcgctacgcggaggaagagcgcgacatgctgctcgacaaccatggtctctacgacctgaaaaagggcatttttctgagtgcggacagcgaagaagagattttcggtcatctggacctggattatctggagccgtgggaacgcaacgcg

SEQ ID NO: 6214 - protein, 393 aa, synthetic construct
  REGION 1..393: note = Variant of terminal deoxynucleotidyl transferase
MHHHHHHGGSGHPEGNTPEKEVPSVIARHVSPYACQRKTTLNNYNKKITDALEIMAENYKFKENLQARLEARRAASVLKSLPFEVTSMKDIQGLPCITDDVRPVIEEIIEVGESSRVKEILNDERYKAFKQFTSVFGVGVKTAEKWYRMGLRTLEEVKASKFLKLNKMQKAGFLYYEDLASGVTKEEKDAVLDIVKETVWTVDPDALVTIVGGFRRGKPQGHDVDLLITIPGRPTDPELLHNVVDLLKKQGLLLYGDIRERTFVEGQLPNPKDQLDNHQKCFAILKLYRPKVDNSAVGTSKKVDMAEVKDWKAVRVDLVVAPDEQFAYAKLGWTGSGMFRRDTRRYAEEERDMLLDNHGLYDLKKGIFLSADSEEEIFGHLDLDYLEPWERNA

SEQ ID NO: 6215 - DNA, 1182 bp, synthetic construct
  misc_feature 1..1182: note = Variant of terminal deoxynucleotidyl transferase
  source 1..1182: mol_type = other DNA
atgcaccatcatcaccatcacgggggctccggccatccggaaggtaataccccggagaaggaggtgccgagcgttatcgcccgtcatgttagtccgtacgcgtgccagcgcaagaccacgctgaataactacaacaaaaagatcaccgacgcgctggagatcatggccgagaactacaagtttaaagagaacctgcaggcgcgcctggaggcccgtcgcgccgcgagtgtcctgaaaagcctgccgttcgaggttaccagcatgaaagacatccaaggtctgccgtgcattaccgacgacgtacgtcctgtgatcgaagagatcatcgaagtaggcgagagcagccgtgttaaagaaatcctcaatgacgagcgctacaaggcctttaagcagttcaccagcgtgttcggtgtgggcgtcaagaccgcggaaaagtggtaccgtatgggcctccgtacgctggaagaagtaaaggccagtaagttcctgaagctgaacaagatgcagaaggcgggcttcctgtactacgaggatctggcgagcggtgttacgaaagaagaaaaagatgccgttctggatatcgtgaaggaaacggtgtggactgttgatccggatgcgctggtgaccatcgtgggcggtttccgccgtggcaaacctcagggccacgacgttgacctgctgatcacgattccgggccgtcctacggatccggagctgctccacaacgtggttgatctgctcaagaagcaaggtctgctgctgtacggggacatccgtgagcgtacgttcgtggaggggcaactgccaaatcctaaacctgaccagctggacgggcatcagaagtgcttcgccattctcaagctgtaccgcccgaaggtggataacagtgcggttgggacgtcgaagaaagtcgacatggctgaggttaaggattggaaagcggttcgtgtggatctggtggtcgctccagatgagcagttcgcctatgcgaaactcggttggacgggcagcggcatgtttcgtcgcgatactcgtcgctacgcggaggaagagcgcgacatgctgctcgacaaccatggtctctacgacctgaaaaagggcatttttctgagtgcggacagcgaagaagagattttcggtcatctggacctggattatctggagccgtgggaacgcaacgcg

SEQ ID NO: 6216 - protein, 394 aa, synthetic construct
  REGION 1..394: note = Variant of terminal deoxynucleotidyl transferase
MHHHHHHGGSGHPEGNTPEKEVPSVIARHVSPYACQRKTTLNNYNKKITDALEIMAENYKFKENLQARLEARRAASVLKSLPFEVTSMKDIQGLPCITDDVRPVIEEIIEVGESSRVKEILNDERYKAFKQFTSVFGVGVKTAEKWYRMGLRTLEEVKASKFLKLNKMQKAGFLYYEDLASGVTKEEKDAVLDIVKETVWTVDPDALVTIVGGFRRGKPQGHDVDLLITIPGRPTDPELLHNVVDLLKKQGLLLYGDIRERTFVEGQLPNPKPDQLDGHQKCFAILKLYRPKVDNSAVGTSKKVDMAEVKDWKAVRVDLVVAPDEQFAYAKLGWTGSGMFRRDTRRYAEEERDMLLDNHGLYDLKKGIFLSADSEEEIFGHLDLDYLEPWERNA

SEQ ID NO: 6217 - DNA, 1182 bp, synthetic construct
  misc_feature 1..1182: note = Variant of terminal deoxynucleotidyl transferase
  source 1..1182: mol_type = other DNA
atgcaccatcatcaccatcacgggggctccggccatccggaaggtaataccccggagaaggaggtgccgagcgttatcgcccgtcatgttagtccgtacgcgtgccagcgcaagaccacgctgaataactacaacaaaaagatcaccgacgcgctggagatcatggccgagaactacaagtttaaagagaacctgcaggcgcgcctggaggcccgtcgcgccgcgagtgtcctgaaaagcctgccgttcgaggttaccagcatgaaagacatccaaggtctgccgtgcattaccgacgacgtacgtcctgtgatcgaagagatcatcgaagtaggcgagagcagccgtgttaaagaaatcctcaatgacgagcgctacaaggcctttaagcagttcaccagcgtgttcggtgtgggcgtcaagaccgcggaaaagtggtaccgtatgggcctccgtacgctggaagaagtaaaggccagtaagttcctgaagctgaacaagatgcagaaggcgggcttcctgtactacgaggatctggcgagcggtgttacgaaagaagaaaaagatgccgttctggatatcgtgaaggaaacggtgtggactgttgatccggatgcgctggtgaccatcgtgggcggtttccgccgtggcaaacctcagggccacgacgttgacctgctgatcacgattccgggccgtcctacggatccggagctgctccacaacgtggttgatctgctcaagaagcaaggtctgctgctgtacggggacatccgtgagcgtacgttcgtggaggggcaactgccaaatcctaaacctgaccagctggacaatcatcagaagtgcttcgccattctcaagctgtaccgcccgaaggtggataacagtgcggttgggacgtcgaagaaagtcgacatggctgaggttaaggattggaaagcggttcgtgtggatctggtggtcgctccagatgagcagttcgcctatgcggagctcggttggacgggcagcggcatgtttcgtcgcgatactcgtcgctacgcggaggaagagcgcgacatgctgctcgacaaccatggtctctacgacttgaaaaagggcatttttctgagtgcggacagcgaagaagagattttcggtcatctggacctggattatctggagccgtgggaacgcaacgcg

SEQ ID NO: 6218 - protein, 394 aa, synthetic construct
  REGION 1..394: note = Variant of terminal deoxynucleotidyl transferase
MHHHHHHGGSGHPEGNTPEKEVPSVIARHVSPYACQRKTTLNNYNKKITDALEIMAENYKFKENLQARLEARRAASVLKSLPFEVTSMKDIQGLPCITDDVRPVIEEIIEVGESSRVKEILNDERYKAFKQFTSVFGVGVKTAEKWYRMGLRTLEEVKASKFLKLNKMQKAGFLYYEDLASGVTKEEKDAVLDIVKETVWTVDPDALVTIVGGFRRGKPQGHDVDLLITIPGRPTDPELLHNVVDLLKKQGLLLYGDIRERTFVEGQLPNPKPDQLDNHQKCFAILKLYRPKVDNSAVGTSKKVDMAEVKDWKAVRVDLVVAPDEQFAYAELGWTGSGMFRRDTRRYAEEERDMLLDNHGLYDLKKGIFLSADSEEEIFGHLDLDYLEPWERNA

SEQ ID NO: 6219 - DNA, 1182 bp, synthetic construct
  misc_feature 1..1182: note = Variant of terminal deoxynucleotidyl transferase
  source 1..1182: mol_type = other DNA
atgcaccatcatcaccatcacgggggctccggccatccggaaggtaataccccggagaaggaggtgccgagcgttatcgcccgtcatgttagtccgtacgcgtgccagcgcaagaccacgctgaataactacaacaaaaagatcaccgacgcgctggagatcatggccgagaactacaagtttaaagagaacgagcaggcgcgcctggaggcccgtcgcgccgcgagtgtcctgaaaagcctgccgttcgaggttaccagcatgaaagacatccaaggtctgccgtgcattaccgacgacgtacgtcctgtgatcgaagagatcatcgaagtaggcgagagcagccgtgttaaagaaatcctcaatgacgagcgctacaaggcctttaagcagttcaccagcgtgttcggtgtgggcgtcaagaccgcggaaaagtggtaccgtatgggcctccgtacgctggaagaagtaaaggccagtaagttcctgaagctgaacaagatgcagaaggcgggcttcctgtactacgaggatctggcgagcggtgttacgaaagaagaaaaagatgccgttctggatatcgtgaaggaaacggtgtggactgttgatccggatgcgctggtgaccatcgtgggcggtttccgccgtggcaaacctcagggccacgacgttgacctgctgatcacgattccgggccgtcctacggatccggagctgctccacaacgtggttgatctgctcaagaagcaaggtctgctgctgtacggggacatccgtgagcgtacgttcgtggaggggcaactgccaaatcctaaacctgaccagctggacaatcatcagaagtgcttcgccattctcaagctgtaccgcccgaaggtggataacagtgcggttgggacgtcgaagaaagtcgacatggctgaggttaaggattggaaagcggttcgtgtggatctggtggtcgctccagatgagcagttcgcctatgcgaaactcggttggacgggcagcggcatgtttcgtcgcgatactcgtcgctacgcggaggaagagcgcgacatgctgctcgacaaccatggtctctacgacctgaaaaagggcatttttctgagtgcggacagcgaagaagagattttcggtcatctggacctggattatctggagccgtgggaacgcaacgcg

SEQ ID NO: 6220 - protein, 394 aa, synthetic construct
  REGION 1..394: note = Variant of terminal deoxynucleotidyl transferase
MHHHHHHGGSGHPEGNTPEKEVPSVIARHVSPYACQRKTTLNNYNKKITDALEIMAENYKFKENEQARLEARRAASVLKSLPFEVTSMKDIQGLPCITDDVRPVIEEIIEVGESSRVKEILNDERYKAFKQFTSVFGVGVKTAEKWYRMGLRTLEEVKASKFLKLNKMQKAGFLYYEDLASGVTKEEKDAVLDIVKETVWTVDPDALVTIVGGFRRGKPQGHDVDLLITIPGRPTDPELLHNVVDLLKKQGLLLYGDIRERTFVEGQLPNPKPDQLDNHQKCFAILKLYRPKVDNSAVGTSKKVDMAEVKDWKAVRVDLVVAPDEQFAYAKLGWTGSGMFRRDTRRYAEEERDMLLDNHGLYDLKKGIFLSADSEEEIFGHLDLDYLEPWERNA

SEQ ID NO: 6221 - DNA, 1182 bp, synthetic construct
  misc_feature 1..1182: note = Variant of terminal deoxynucleotidyl transferase
  source 1..1182: mol_type = other DNA
atgcaccatcatcaccatcacgggggctccggccatccggaaggtaataccccggagaaggaggtgccgagcgttatcgcccgtcatgttagtccgtacgcgtgccagcgcaagaccacgctgaataactacaacaaaaagatcaccgacgcgctggagatcatggccgagaactacaagtttaaagagaacctgcaggcgcgcctggaggcccgtcgcgccgcgagtgtcctgaaaagcctgccgttcgaggttaccagcatgaaagacatccaaggtctgccgtgcattaccgacgacgtacgtcctgtgatcgaagagatcatcgaagtaggcgagagcagccgtgttaaagaaatcctcaatgacgagcgctacaaggcctttaagcagttcaccagcgtgttcggtgtgggcgtcaagaccgcggaaaagtggtaccgtatgggcctccgtacgctggaagaagtaaaggccagtaagttcctgaagctgaacaagatgcagaaggcgggcttcctgtactacgaggatctggcgagcggtgttacgaaagaagaaaaagatgccgttctggatatcgtgaaggaaacggtgtggactgttgatccggatgcgctggtgaccatcgtgggcggtttccgccgtggcaaacctcagggccacgacgttgacctgctgatcacgattccgggccgtcctacggatccggagctgctccacaacgtggttgatctgctcaagaagcaaggtctgctgctgtacggggacatccgtgagcgtacgttcgtggaggggcaactgccaaatcctaaacctgaccagctggacaatcatcagaagtgcttcgccattctcaagctgtaccgcccgaaggtggataacagtgcggttgggacgtcgaagaaagtcgacatggctgaggttaaggattggaaagcggttcgtgtggatctggtggtcgctccagatgagcagttcgcctatgcgactctcggttggacgggcagcggcatgtttcgtcgcgatactcgtcgctacgcggaggaagagcgcgacatgctgctcgacaaccatggtctctacgacctgaaaaagggcatttttctgagtgcggacagcgaagaagagattttcggtcatctggacctggattatctggagccgtgggaacgcaacgcg

SEQ ID NO: 6222 - protein, 394 aa, synthetic construct
  REGION 1..394: note = Variant of terminal deoxynucleotidyl transferase
MHHHHHHGGSGHPEGNTPEKEVPSVIARHVSPYACQRKTTLNNYNKKITDALEIMAENYKFKENLQARLEARRAASVLKSLPFEVTSMKDIQGLPCITDDVRPVIEEIIEVGESSRVKEILNDERYKAFKQFTSVFGVGVKTAEKWYRMGLRTLEEVKASKFLKLNKMQKAGFLYYEDLASGVTKEEKDAVLDIVKETVWTVDPDALVTIVGGFRRGKPQGHDVDLLITIPGRPTDPELLHNVVDLLKKQGLLLYGDIRERTFVEGQLPNPKPDQLDNHQKCFAILKLYRPKVDNSAVGTSKKVDMAEVKDWKAVRVDLVVAPDEQFAYATLGWTGSGMFRRDTRRYAEEERDMLLDNHGLYDLKKGIFLSADSEEEIFGHLDLDYLEPWERNA

SEQ ID NO: 6223 - DNA, 1182 bp, synthetic construct
  misc_feature 1..1182: note = Variant of terminal deoxynucleotidyl transferase
  source 1..1182: mol_type = other DNA
atgcaccatcatcaccatcacgggggctccggccatccggaaggtaataccccggagaaggaggtgccgagcgttatcgcccgtcatgttagtccgtacgcgtgccagcgcaagaccacgctgaataactacaacaaaaagatcaccgacgcgctggagatcatggccgagaactacaagtttaaagagaacctgcaggcgcgcctggaggcccgtcgcgccgcgagtgtcctgaaaagcctgccgttcgaggttaccagcatgaaagacatccaaggtctgccgtgcattaccgacgacgtacgtcctgtgatcgaagagatcatcgaagtaggcgagagcagccgtgttaaagaaatcctcaatgacgagcgctacaaggcctttaagcagttcaccagcgtgttcggtgtgggcgtcaagaccgcggaaaagtggtaccgtatgggcctccgtacgctggaagaagtaaaggccagtaagttcctgaagctgaacaagatgcagaaggcgggcttcctgtactacgaggatctggcgagcggtgttacgaaagaagaaaaagatgccgttctggatatcgtgaaggaaacggtgtggactgttgatccggatgcgctggtgaccatcgtgggcggtttccgccgtggcaaacctcagggccacgacgttgacctgctgatcacgattccgggccgtcctacggatccggagctgctccacaacgtggttgatctgctcaagaagcaaggtctgctgctgtacggggacatccgtgagcgtacgttcgtggaggggcaactgccaaatcctaaacctgaccagctggacaatcatcagaagtgcttcgccattctcaagctgtaccgcccgaaggtggataacagtgcggttgggacgtcgaagaaagtcgacatggctgaggttaaggattggaaagcggttcgtgtggatctggtggtcgctccagatgagcagttcgcctatgcgaaactcggttggacgggcagcggcatgtttcgtcgcgatacttggcgctacgcggaggaagagcgcgacatgctgctcgacaaccatggtctctacgacctgaaaaagggcatttttctgagtgcggacagcgaagaagagattttcggtcatctggacctggattatctggagccgtgggaacgcaacgcg

SEQ ID NO: 6224 - protein, 394 aa, synthetic construct
  REGION 1..394: note = Variant of terminal deoxynucleotidyl transferase
MHHHHHHGGSGHPEGNTPEKEVPSVIARHVSPYACQRKTTLNNYNKKITDALEIMAENYKFKENLQARLEARRAASVLKSLPFEVTSMKDIQGLPCITDDVRPVIEEIIEVGESSRVKEILNDERYKAFKQFTSVFGVGVKTAEKWYRMGLRTLEEVKASKFLKLNKMQKAGFLYYEDLASGVTKEEKDAVLDIVKETVWTVDPDALVTIVGGFRRGKPQGHDVDLLITIPGRPTDPELLHNVVDLLKKQGLLLYGDIRERTFVEGQLPNPKPDQLDNHQKCFAILKLYRPKVDNSAVGTSKKVDMAEVKDWKAVRVDLVVAPDEQFAYAKLGWTGSGMFRRDTWRYAEEERDMLLDNHGLYDLKKGIFLSADSEEEIFGHLDLDYLEPWERNA

SEQ ID NO: 6225 - DNA, 1182 bp, synthetic construct
  misc_feature 1..1182: note = Variant of terminal deoxynucleotidyl transferase
  source 1..1182: mol_type = other DNA
atgcaccatcatcaccatcacgggggctccggccatccggaaggtaataccccggagaaggaggtgccgagcgttatcgcccgtcatgttagtccgtacgcgtgccagcgcaagaccacgctgaataactacaacaaaaagatcaccgacgcgctggagatcatggccgagaactacaagtttaaagagaacctgcaggcgcgcctggaggcccgtatggccgcgagtgtcctgaaaagcctgccgttcgaggttaccagcatgaaagacatccaaggtctgccgtgcattaccgacgacgtacgtcctgtgatcgaagagatcatcgaagtaggcgagagcagccgtgttaaagaaatcctcaatgacgagcgctacaaggcctttaagcagttcaccagcgtgttcggtgtgggcgtcaagaccgcggaaaagtggtaccgtatgggcctccgtacgctggaagaagtaaaggccagtaagttcctgaagctgaacaagatgcagaaggcgggcttcctgtactacgaggatctggcgagcggtgttacgaaagaagaaaaagatgccgttctggatatcgtgaaggaaacggtgtggactgttgatccggatgcgctggtgaccatcgtgggcggtttccgccgtggcaaacctcagggccacgacgttgacctgctgatcacgattccgggccgtcctacggatccggagctgctccacaacgtggttgatctgctcaagaagcaaggtctgctgctgtacggggacatccgtgagcgtacgttcgtggaggggcaactgccaaatcctaaacctgaccagctggacaatcatcagaagtgcttcgccattctcaagctgtaccgcccgaaggtggataacagtgcggttgggacgtcgaagaaagtcgacatggctgaggttaaggattggaaagcggttcgtgtggatctggtggtcgctccagatgagcagttcgcctatgcgaaactcggttggacgggcagcggcatgtttcgtcgcgatactcgtcgctacgcggaggaagagcgcgacatgctgctcgacaaccatggtctctacgacctgaaaaagggcatttttctgagtgcggacagcgaagaagagattttcggtcatctggacctggattatctggagccgtgggaacgcaacgcg

SEQ ID NO: 6226 - protein, 394 aa, synthetic construct
  REGION 1..394: note = Variant of terminal deoxynucleotidyl transferase
MHHHHHHGGSGHPEGNTPEKEVPSVIARHVSPYACQRKTTLNNYNKKITDALEIMAENYKFKENLQARLEARMAASVLKSLPFEVTSMKDIQGLPCITDDVRPVIEEIIEVGESSRVKEILNDERYKAFKQFTSVFGVGVKTAEKWYRMGLRTLEEVKASKFLKLNKMQKAGFLYYEDLASGVTKEEKDAVLDIVKETVWTVDPDALVTIVGGFRRGKPQGHDVDLLITIPGRPTDPELLHNVVDLLKKQGLLLYGDIRERTFVEGQLPNPKPDQLDNHQKCFAILKLYRPKVDNSAVGTSKKVDMAEVKDWKAVRVDLVVAPDEQFAYAKLGWTGSGMFRRDTRRYAEEERDMLLDNHGLYDLKKGIFLSADSEEEIFGHLDLDYLEPWERNA

SEQ ID NO: 6227 - DNA, 1182 bp, synthetic construct
  misc_feature 1..1182: note = Variant of terminal deoxynucleotidyl transferase
  source 1..1182: mol_type = other DNA
atgcaccatcatcaccatcacgggggctccggccatccggaaggtaataccccggagaaggaggtgccgagcgttatcgcccgtcatgttagtccgtacgcgtgccagcgcaagaccacgctgaataactacaacaaaaagatcaccgacgcgctggagatcatggccgagaactacaagtttaaagagaacctgcaggcgcgcctggaggcccgtcgcgccgcgagtgtcctgaaaagcctgccgttcgaggttaccagcatgaaagacatccaaggtctgccgtgcattaccgacgacgtacgtcctgtgatcgaagagatcatcgaagtaggcgagagcagccgtgttaaagaaatcctcaatgacgagcgctacaaggcctttaagcagttcaccagcgtgttcggtgtgggcgtcaagaccgcggaaaagtggtaccgtatgggcctccgtacgctggaagaagtaaaggccagtaagttcctgaagctgaacaagatgcagaaggcgggcttcctgtactacgaggatctggcgagcggtgttacgaaagaagaaaaagatgccgttctggatatcgtgaaggaaacggtgtggactgttgatccggatgcgctggtgaccatcgtgggcggtttccgccgtggcaaacctcagggccacgacgttgacctgctgatcacgattccgggccgtcctacggatccggagctgctccacaacgtggttgatctgctcaagaagcaaggtctgctgctgtacggggacatccgtgagcgtacgttcgtggaggggcaactgccaaatcctaaacctgaccagctggacaatcatcagaagtgcttcgccattctcaagctgtaccgcccgaaggtggataacagtgcggttgggacgtcgaagaaagtcgacatggctgaggttaaggattggaaagcggttcgtgtggatctggtggtcgctccagatgagcagttcgcctatgcgaaactcggttggacgggcagcggcatgtttcgtcgcgatactcagcgctacgcggaggaagagcgcgacatgctgctcgacaaccatggtctctacgacctgaaaaagggcatttttctgagtgcggacagcgaagaagagattttcggtcatctggacctggattatctggagccgtgggaacgcaacgcg

SEQ ID NO: 6228 - protein, 394 aa, synthetic construct
  REGION 1..394: note = Variant of terminal deoxynucleotidyl transferase
MHHHHHHGGSGHPEGNTPEKEVPSVIARHVSPYACQRKTTLNNYNKKITDALEIMAENYKFKENLQARLEARRAASVLKSLPFEVTSMKDIQGLPCITDDVRPVIEEIIEVGESSRVKEILNDERYKAFKQFTSVFGVGVKTAEKWYRMGLRTLEEVKASKFLKLNKMQKAGFLYYEDLASGVTKEEKDAVLDIVKETVWTVDPDALVTIVGGFRRGKPQGHDVDLLITIPGRPTDPELLHNVVDLLKKQGLLLYGDIRERTFVEGQLPNPKPDQLDNHQKCFAILKLYRPKVDNSAVGTSKKVDMAEVKDWKAVRVDLVVAPDEQFAYAKLGWTGSGMFRRDTQRYAEEERDMLLDNHGLYDLKKGIFLSADSEEEIFGHLDLDYLEPWERNA

SEQ ID NO: 6229 - DNA, 1182 bp, synthetic construct
  misc_feature 1..1182: note = Variant of terminal deoxynucleotidyl transferase
  source 1..1182: mol_type = other DNA
atgcaccatcatcaccatcacgggggctccggccatccggaaggtaataccccggagaaggaggtgccgagcgttatcgcccgtcatgttagtccgtacgcgtgccagcgcaagaccacgctgaataactacaacaaaaagatcaccgacgcgctggagatcatggccgagaactacaagtttaaagagaacctgcaggcgcgcctggaggcccgtcgcgccgcgagtgtcctgaaaagcctgccgttcgaggttaccagcatgaaagacatccaaggtctgccgtgcattaccgacgacgtacgtcctgtgatcgaagagatcatcgaagtaggcgagagcagccgtgttaaagaaatcctcaatgacgagcgctacaaggcctttaagcagttcaccagcgtgttcggtgtgggcgtcaagaccgcggaaaagtggtaccgtatgggcctccgtacgctggaagaagtaaaggccagtaagttcctgaagctgaacaagatgcagaaggcgggcttcctgtactacgaggatctggcgagcggtgttacgaaagaagaaaaagatgccgttctggatatcgtgaaggaaacggtgtggactgttgatccggatgcgctggtgaccatcgtgggcggtttccgccgtggcaaagagcagggccacgacgttgacctgctgatcacgattccgggccgtcctacggatccggagctgctccacaacgtggttgatctgctcaagaagcaaggtctgctgctgtacggggacatccgtgagcgtacgttcgtggaggggcaactgccaaatcctaaacctgaccagctggacaatcatcagaagtgcttcgccattctcaagctgtaccgcccgaaggtggataacagtgcggttgggacgtcgaagaaagtcgacatggctgaggttaaggattggaaagcggttcgtgtggatctggtggtcgctccagatgagcagttcgcctatgcgaaactcggttggacgggcagcggcatgtttcgtcgcgatactcgtcgctacgcggaggaagagcgcgacatgctgctcgacaaccatggtctctacgacctgaaaaagggcatttttctgagtgcggacagcgaagaagagattttcggtcatctggacctggattatctggagccgtgggaacgcaacgcg

SEQ ID NO: 6230 - protein, 394 aa, synthetic construct
  REGION 1..394: note = Variant of terminal deoxynucleotidyl transferase
MHHHHHHGGSGHPEGNTPEKEVPSVIARHVSPYACQRKTTLNNYNKKITDALEIMAENYKFKENLQARLEARRAASVLKSLPFEVTSMKDIQGLPCITDDVRPVIEEIIEVGESSRVKEILNDERYKAFKQFTSVFGVGVKTAEKWYRMGLRTLEEVKASKFLKLNKMQKAGFLYYEDLASGVTKEEKDAVLDIVKETVWTVDPDALVTIVGGFRRGKEQGHDVDLLITIPGRPTDPELLHNVVDLLKKQGLLLYGDIRERTFVEGQLPNPKPDQLDNHQKCFAILKLYRPKVDNSAVGTSKKVDMAEVKDWKAVRVDLVVAPDEQFAYAKLGWTGSGMFRRDTRRYAEEERDMLLDNHGLYDLKKGIFLSADSEEEIFGHLDLDYLEPWERNA

SEQ ID NO: 6231 - DNA, 1182 bp, synthetic construct
  misc_feature 1..1182: note = Variant of terminal deoxynucleotidyl transferase
  source 1..1182: mol_type = other DNA
atgcaccatcatcaccatcacgggggctccggccatccggaaggtaataccccggagaaggaggtgccgagcgttatcgcccgtcatgttagtccgtacgcgtgccagcgcaagaccacgctgaataactacaacaaaaagatcaccgacgcgctggagatcatggccgagaactacaagtttaaagagaacctgcaggcgcgcctggaggcccgtcgcgccgcgagtgtcctgaaaagcctgccgttcgaggttaccagcatgaaagacatccaaggtctgccgtgcattaccgacgacgtacgtcctgtgatcgaagagatcatcgaagtaggcgagagcagccgtgttaaagaaatcctcaatgacgagcgctacaaggcctttaagcagttcaccagcgtgttcggtgtgggcgtcaagaccgcggaaaagtggtaccgtatgggcctccgtacgctggaagaagtaaaggccagtaagttcctgaagctgaacaagatgcagaaggcgggcttcctgtactacgaggatctggcgagcggtgttacgaaagaagaaaaagatgccgttctggatatcgtgaaggaaacggtgtggactgttgatccggatgcgctggtgaccatcgtgggcggtttccgccgtggcaaacctcagggccacgacgttgacctgctgatcacgattccgggccgtcctacggatccggagctgctccacaacgtggttgatctgctcaagaagcaaggtctgctgctgtacggggacatccgtgagcgtacgttcgtggaggggcaactgccaaatcctaaagaggaccagctggacaatcatcagaagtgcttcgccattctcaagctgtaccgcccgaaggtggataacagtgcggttgggacgtcgaagaaagtcgacatggctgaggttaaggattggaaagcggttcgtgtggatctggtggtcgctccagatgagcagttcgcctatgcgaaactcggttggacgggcagcggcatgtttcgtcgcgatactcgtcgctacgcggaggaagagcgcgacatgctgctcgacaaccatggtctctacgacctgaaaaagggcatttttctgagtgcggacagcgaagaagagattttcggtcatctggacctggattatctggagccgtgggaacgcaacgcg

SEQ ID NO: 6232 - protein, 394 aa, synthetic construct
  REGION 1..394: note = Variant of terminal deoxynucleotidyl transferase
MHHHHHHGGSGHPEGNTPEKEVPSVIARHVSPYACQRKTTLNNYNKKITDALEIMAENYKFKENLQARLEARRAASVLKSLPFEVTSMKDIQGLPCITDDVRPVIEEIIEVGESSRVKEILNDERYKAFKQFTSVFGVGVKTAEKWYRMGLRTLEEVKASKFLKLNKMQKAGFLYYEDLASGVTKEEKDAVLDIVKETVWTVDPDALVTIVGGFRRGKPQGHDVDLLITIPGRPTDPELLHNVVDLLKKQGLLLYGDIRERTFVEGQLPNPKEDQLDNHQKCFAILKLYRPKVDNSAVGTSKKVDMAEVKDWKAVRVDLVVAPDEQFAYAKLGWTGSGMFRRDTRRYAEEERDMLLDNHGLYDLKKGIFLSADSEEEIFGHLDLDYLEPWERNA

SEQ ID NO: 6233 - DNA, 1182 bp, synthetic construct
  misc_feature 1..1182: note = Variant of terminal deoxynucleotidyl transferase
  source 1..1182: mol_type = other DNA
atgcaccatcatcaccatcacgggggctccggccatccggaaggtaataccccggagaaggaggtgccgagcgttatcgcccgtcatgttagtccgtacgcgtgccagcgcaagaccacgctgaataactacaacaaaaagatcaccgacgcgctggagatcatggccgagaactacaagtttaaagagaacctgggtgcgcgcctggaggcccgtcgcgccgcgagtgtcctgaaaagcctgccgttcgaggttaccagcatgaaagacatccaaggtctgccgtgcattaccgacgacgtacgtcctgtgatcgaagagatcatcgaagtaggcgagagcagccgtgttaaagaaatcctcaatgacgagcgctacaaggcctttaagcagttcaccagcgtgttcggtgtgggcgtcaagaccgcggaaaagtggtaccgtatgggcctccgtacgctggaagaagtaaaggccagtaagttcctgaagctgaacaagatgcagaaggcgggcttcctgtactacgaggatctggcgagcggtgttacgaaagaagaaaaagatgccgttctggatatcgtgaaggaaacggtgtggactgttgatccggatgcgctggtgaccatcgtgggcggtttccgccgtggcaaacctcagggccacgacgttgacctgctgatcacgattccgggccgtcctacggatccggagctgctccacaacgtggttgatctgctcaagaagcaaggtctgctgctgtacggggacatccgtgagcgtacgttcgtggaggggcaactgccaaatcctaaacctgaccagctggacaatcatcagaagtgcttcgccattctcaagctgtaccgcccgaaggtggataacagtgcggttgggacgtcgaagaaagtcgacatggctgaggttaaggattggaaagcggttcgtgtggatctggtggtcgctccagatgagcagttcgcctatgcgaaactcggttggacgggcagcggcatgtttcgtcgcgatactcgtcgctacgcggaggaagagcgcgacatgctgctcgacaaccatggtctctacgacctgaaaaagggcatttttctgagtgcggacagcgaagaagagattttcggtcatctggacctggattatctggagccgtgggaacgcaacgcg

SEQ ID NO: 6234 - protein, 394 aa, synthetic construct
  REGION 1..394: note = Variant of terminal deoxynucleotidyl transferase
MHHHHHHGGSGHPEGNTPEKEVPSVIARHVSPYACQRKTTLNNYNKKITDALEIMAENYKFKENLGARLEARRAASVLKSLPFEVTSMKDIQGLPCITDDVRPVIEEIIEVGESSRVKEILNDERYKAFKQFTSVFGVGVKTAEKWYRMGLRTLEEVKASKFLKLNKMQKAGFLYYEDLASGVTKEEKDAVLDIVKETVWTVDPDALVTIVGGFRRGKPQGHDVDLLITIPGRPTDPELLHNVVDLLKKQGLLLYGDIRERTFVEGQLPNPKPDQLDNHQKCFAILKLYRPKVDNSAVGTSKKVDMAEVKDWKAVRVDLVVAPDEQFAYAKLGWTGSGMFRRDTRRYAEEERDMLLDNHGLYDLKKGIFLSADSEEEIFGHLDLDYLEPWERNA

SEQ ID NO: 6235 - DNA, 1182 bp, synthetic construct
  misc_feature 1..1182: note = Variant of terminal deoxynucleotidyl transferase
  source 1..1182: mol_type = other DNA
atgcaccatcatcaccatcacgggggctccggccatccggaaggtaataccccggagaaggaggtgccgagcgttatcgcccgtcatgttagtccgtacgcgtgccagcgcaagaccacgctgaataactacaacaaaaagatcaccgacgcgctggagatcatggccgagaactacaagtttaaagagaacctgcaggcgcgcctggaggcccgtcgcgccgcgagtgtcctgaaaagcctgccgttcgaggttaccagcatgaaagacatccaaggtctgccgtgcattaccgacgacgtacgtcctgtgatcgaagagatcatcgaagtaggcgagagcagccgtgttaaagaaatcctcaatgacgagcgctacaaggcctttaagcagttcaccagcgtgttcggtgtgggcgtcaagaccgcggaaaagtggtaccgtatgggcctccgtacgctggaagaagtaaaggccagtaagttcctgaagctgaacaagatgcagaaggcgggcttcctgtactacgaggatctggcgagcggtgttacgaaagaagaaaaagatgccgttctggatatcgtgaaggaaacggtgtggactgttgatccggatgcgctggtgaccatcgtgggcggtttccgccgtggcaaaagtcagggccacgacgttgacctgctgatcacgattccgggccgtcctacggatccggagctgctccacaacgtggttgatctgctcaagaagcaaggtctgctgctgtacggggacatccgtgagcgtacgttcgtggaggggcaactgccaaatcctaaacctgaccagctggacaatcatcagaagtgcttcgccattctcaagctgtaccgcccgaaggtggataacagtgcggttggggcgtcgaagaaagtcgacatggctgaggttaaggattggaaagcggttcgtgtggatctggtggtcgctccagatgagcagttcgcctatgcgaaactcggttggacgggcagcggcatgtttcgtcgcgatactcgtcgctacgcggaggaagagcgcgacatgctgctcgacaaccatggtctctacgacctgaaaaagggcatttttctgagtgcggacagcgaagaagagattttcggtcatctggacctggattatctggagccgtgggaacgcaacgcg

SEQ ID NO: 6236 - protein, 394 aa, synthetic construct
  REGION 1..394: note = Variant of terminal deoxynucleotidyl transferase
MHHHHHHGGSGHPEGNTPEKEVPSVIARHVSPYACQRKTTLNNYNKKITDALEIMAENYKFKENLQARLEARRAASVLKSLPFEVTSMKDIQGLPCITDDVRPVIEEIIEVGESSRVKEILNDERYKAFKQFTSVFGVGVKTAEKWYRMGLRTLEEVKASKFLKLNKMQKAGFLYYEDLASGVTKEEKDAVLDIVKETVWTVDPDALVTIVGGFRRGKSQGHDVDLLITIPGRPTDPELLHNVVDLLKKQGLLLYGDIRERTFVEGQLPNPKPDQLDNHQKCFAILKLYRPKVDNSAVGASKKVDMAEVKDWKAVRVDLVVAPDEQFAYAKLGWTGSGMFRRDTRRYAEEERDMLLDNHGLYDLKKGIFLSADSEEEIFGHLDLDYLEPWERNA

SEQ ID NO: 6237 - DNA, 1182 bp, synthetic construct
  misc_feature 1..1182: note = Variant of terminal deoxynucleotidyl transferase
  source 1..1182: mol_type = other DNA
atgcaccatcatcaccatcacgggggctccggccatccggaaggtaataccccggagaaggaggtgccgagcgttatcgcccgtcatgttagtccgtacgcgtgccagcgcaagaccacgctgaataactacaacaaaaagatcaccgacgcgctggagatcatggccgagaactacaagtttaaagagaacctgcaggcgcgcctggaggcccgtcgcgccgcgagtgtcctgaaaagcctgccgttcgaggttaccagcatgaaagacatccaaggtctgccgtgcattaccgacgacgtacgtcctgtgatcgaagagatcatcgaagtaggcgagagcagccgtgttaaagaaatcctcaatgacgagcgctacaaggcctttaagcagttcaccagcgtgttcggtgtgggcgtcaagaccgcgggtaagtggtaccgtatgggcctccgtacgctggaagaagtaaaggccagtaagttcctgaagctgaacaagatgcagaaggcgggcttcctgtactacgaggatctggcgagcggtgttacgaaagaagaaaaagatgccgttctggatatcgtgaaggaaacggtgtggactgttgatccggatgcgctggtgaccatcgtgggcggtttccgccgtggcaaacctcggggccacgacgttgacctgctgatcacgattccgggccgtcctacggatccggagctgctccacaacgtggttgatctgctcaagaagcaaggtctgctgctgtacggggacatccgtgagcgtacgttcgtggaggggcaactgccaaatcctaaacctgaccagctggacaatcatcagaagtgcttcgccattctcaagctgtaccgcccgaaggtggataacagtgcggttgggacgtcgaagaaagtcgacatggctgaggttaaggattggaaagcggttcgtgtggatctggtggtcgctccagatgagcagttcgcctatgcgaaactcggttggacgggcagcggcatgtttcgtcgcgatactcgtcgctacgcggaggaagagcgcgacatgctgctcgacaaccatggtctctacgacctgaaaaagggcatttttctgagtgcggacagcgaagaagagattttcggtcatctggacctggattatctggagccgtgggaacgcaacgcg

SEQ ID NO: 6238 - protein, 394 aa, synthetic construct
  REGION 1..394: note = Variant of terminal deoxynucleotidyl transferase
MHHHHHHGGSGHPEGNTPEKEVPSVIARHVSPYACQRKTTLNNYNKKITDALEIMAENYKFKENLQARLEARRAASVLKSLPFEVTSMKDIQGLPCITDDVRPVIEEIIEVGESSRVKEILNDERYKAFKQFTSVFGVGVKTAGKWYRMGLRTLEEVKASKFLKLNKMQKAGFLYYEDLASGVTKEEKDAVLDIVKETVWTVDPDALVTIVGGFRRGKPRGHDVDLLITIPGRPTDPELLHNVVDLLKKQGLLLYGDIRERTFVEGQLPNPKPDQLDNHQKCFAILKLYRPKVDNSAVGTSKKVDMAEVKDWKAVRVDLVVAPDEQFAYAKLGWTGSGMFRRDTRRYAEEERDMLLDNHGLYDLKKGIFLSADSEEEIFGHLDLDYLEPWERNA

SEQ ID NO: 6239 - DNA, 1182 bp, synthetic construct
  misc_feature 1..1182: note = Variant of terminal deoxynucleotidyl transferase
  source 1..1182: mol_type = other DNA
atgcaccatcatcaccatcacgggggctccggccatccggaaggtaataccccggagaaggaggtgccgagcgttatcgcccgtcatgttagtccgtacgcgtgccagcgcaagaccacgctgaataactacaacaaaaagatcaccgacgcgctggagatcatggccgagaactacaagtttaaagagaacctgcaggcgcgcctggaggcccgtcgcgccgcgagtgtcctgaaaagcctgccgttcgaggttaccagcatgaaagacatccaaggtctgccgtgcattaccgacgacgtacgtcctgtgatcgaagagatcatcgaagtaggcgagagcagccgtgttaaagaaatcctcaatgacgagcgctacaaggtttttaagcagttcaccagcgtgttcggtgtgggcgtcaagaccgcggaaaagtggtaccgtatgggcctccgtacgctggaagaagtaaaggccagtaagttcctgaagctgaacaagatgcagaaggcgggcttcctgtactacgaggatctggcgagcggtgttacgaaagaagaaaaagatgccgttctggatatcgtgaaggaaacggtgtggactgttgatccggatgcgctggtgaccatcgtgggcggtttccgccgtggcaaacctcagggccacgacgttgacctgctgatcacgattccgggccgtcctacggatccggagctgctccacaacgtggttgatctgctcaagaagcaaggtctgctgctgtacggggacatccgtgagcgtacgttcgtggaggggcaactgccaaatcctaaacctgaccagctggacaatcatcagaagtgcttcgccattctcaagctgtaccgcccgaaggtggataacggtgcggttgggacgtcgaagaaagtcgacatggctgaggttaaggattggaaagcggttcgtgtggatctggtggtcgctccagatgagcagttcgcctatgcgaaactcggttggacgggcagcggcatgtttcgtcgcgatactcgtcgctacgcggaggaagagcgcgacatgctgctcgacaaccatggtctctacgacctgaaaaagggcatttttctgagtgcggacagcgaagaagagattttcggtcatctggacctggattatctggagccgtgggaacgcaacgcg

SEQ ID NO: 6240 - protein, 394 aa, synthetic construct
  REGION 1..394: note = Variant of terminal deoxynucleotidyl transferase
MHHHHHHGGSGHPEGNTPEKEVPSVIARHVSPYACQRKTTLNNYNKKITDALEIMAENYKFKENLQARLEARRAASVLKSLPFEVTSMKDIQGLPCITDDVRPVIEEIIEVGESSRVKEILNDERYKVFKQFTSVFGVGVKTAEKWYRMGLRTLEEVKASKFLKLNKMQKAGFLYYEDLASGVTKEEKDAVLDIVKETVWTVDPDALVTIVGGFRRGKPQGHDVDLLITIPGRPTDPELLHNVVDLLKKQGLLLYGDIRERTFVEGQLPNPKPDQLDNHQKCFAILKLYRPKVDNGAVGTSKKVDMAEVKDWKAVRVDLVVAPDEQFAYAKLGWTGSGMFRRDTRRYAEEERDMLLDNHGLYDLKKGIFLSADSEEEIFGHLDLDYLEPWERNA

SEQ ID NO: 6241 - DNA, 1182 bp, synthetic construct
  misc_feature 1..1182: note = Variant of terminal deoxynucleotidyl transferase
  source 1..1182: mol_type = other DNA
atgcaccatcatcaccatcacgggggctccggccatccggaaggtaataccccggagaaggaggtgccgagcgttatcgcccgtcatgttagtccgtacgcgtgccagcgcaagaccacgctgaataactacaacaaaaagatcaccgacgcgctggagatcatggccgagaactacaagtttaaagagaacaatcaggcgcgcctggaggcccgtcgcgccgcgagtgtcctgaaaagcctgccgttcgaggttaccagcatgaaagacatccaaggtctgccgtgcattaccgacgacgtacgtcctgtgatcgaagagatcatcgaagtaggcgagagcagccgtgttaaagaaatcctcaatgacgagcgctacaaggcctttaagcagttcaccagcgtgttcggtgtgggcgtcaagaccgcggaaaagtggtaccgtatgggcctccgtacgctggaagaagtaaaggccagtaagttcctgaagctgaacaagatgcagaaggcgggcttcctgtactacgaggatctggcgagcggtgttacgaaagaagaaaaagatgccgttctggatatcgtgaaggaaacggtgtggactgttgatccggatgcgctggtgaccatcgtgggcggtttccgccgtggcaaacctcagggccacgacgttgacctgctgatcacgattccgggccgtcctacggatccggagctgctccacaacgtggttgatctgctcaagaagcaaggtctgctgctgtacggggacatccgtgagcgtacgttcgtggaggggcaactgccaaatcctaaacctgaccagctggacaatcatcagaagtgcttcgccattctcaagctgtaccgcccgaaggtggataacagtgcggttgggacgtcgaagaaagtcgacatggctgaggttaaggattggaaagcggttcgtgtggatctggtggtcgctccagatgagcagttcgcctatgcgaaactcggttggacgggcagcggcatgtttcgtcgcgatactcgtcgctacgcggaggaagagcgcgacatgctgctcgacaaccatggtctctacgacctgaaaaagggcatttttctgagtgcggacagcgaagaagagattttcggtcatctggacctggattatctggagccgtgggaacgcaacgcg

SEQ ID NO: 6242 - protein, 394 aa, synthetic construct
  REGION 1..394: note = Variant of terminal deoxynucleotidyl transferase
MHHHHHHGGSGHPEGNTPEKEVPSVIARHVSPYACQRKTTLNNYNKKITDALEIMAENYKFKENNQARLEARRAASVLKSLPFEVTSMKDIQGLPCITDDVRPVIEEIIEVGESSRVKEILNDERYKAFKQFTSVFGVGVKTAEKWYRMGLRTLEEVKASKFLKLNKMQKAGFLYYEDLASGVTKEEKDAVLDIVKETVWTVDPDALVTIVGGFRRGKPQGHDVDLLITIPGRPTDPELLHNVVDLLKKQGLLLYGDIRERTFVEGQLPNPKPDQLDNHQKCFAILKLYRPKVDNSAVGTSKKVDMAEVKDWKAVRVDLVVAPDEQFAYAKLGWTGSGMFRRDTRRYAEEERDMLLDNHGLYDLKKGIFLSADSEEEIFGHLDLDYLEPWERNA

SEQ ID NO: 6243 - DNA, 1182 bp, synthetic construct
  misc_feature 1..1182: note = Variant of terminal deoxynucleotidyl transferase
  source 1..1182: mol_type = other DNA
atgcaccatcatcaccatcacgggggctccggccatccggaaggtaataccccggagaaggaggtgccgagcgttatcgcccgtcatgttagtccgtacgcgtgccagcgcaagaccacgctgaataactacaacaaaaagatcaccgacgcgctggagatcatggccgagaactacaagtttaaagagaacctgcaggcgcgcctggaggcccgtcgcgccgcgagtgtcctgaaaagcctgccgttcgaggttaccagcatgaaagacatccaaggtctgccgtgcattaccgacgacgtacgtcctgtgatcgaagagatcatcgaagtaggcgagagcagccgtgttaaagaaatcctcaatgacgagcgctacaaggcctttaagcagttcaccagcgtgttcggtgtgggcgtcaagaccgcggaaaagtggtaccgtatgggctggcgtacgctggaagaagtaaaggccagtaagttcctgaagctgaacaagatgcagaaggcgggcttcctgtactacgaggatctggcgagcggtgttacgaaagaagaaaaagatgccgttctggatatcgtgaaggaaacggtgtggactgttgatccggatgcgctggtgaccatcgtgggcggtttccgccgtggcaaacctcagggccacgacgttgacctgctgatcacgattccgggccgtcctacggatccggagctgctccacaacgtggttgatctgctcaagaagcaaggtctgctgctgtacggggacatccgtgagcgtacgttcgtggaggggcaactgccaaatcctaaacctgaccagctggacaatcatcagaagtgcttcgccattctcaagctgtaccgcccgaaggtggataacagtgcggttgggacgtcgaagaaagtcgacatggctgaggttaaggattggaaagcggttcgtgtggatctggtggtcgctccagatgagcagttcgcctatgcgaaactcggttggacgggcagcggcatgtttcgtcgcgatactcgtcgctacgcggaggaagagcgcgacatgctgctcgacaaccatggtctctacgacctgaaaaagggcatttttctgagtgcggacagcgaagaagagattttcggtcatctggacctggattatctggagccgtgggaacgcaacgcg

SEQ ID NO: 6244 - protein, 394 aa, synthetic construct
  REGION 1..394: note = Variant of terminal deoxynucleotidyl transferase
MHHHHHHGGSGHPEGNTPEKEVPSVIARHVSPYACQRKTTLNNYNKKITDALEIMAENYKFKENLQARLEARRAASVLKSLPFEVTSMKDIQGLPCITDDVRPVIEEIIEVGESSRVKEILNDERYKAFKQFTSVFGVGVKTAEKWYRMGWRTLEEVKASKFLKLNKMQKAGFLYYEDLASGVTKEEKDAVLDIVKETVWTVDPDALVTIVGGFRRGKPQGHDVDLLITIPGRPTDPELLHNVVDLLKKQGLLLYGDIRERTFVEGQLPNPKPDQLDNHQKCFAILKLYRPKVDNSAVGTSKKVDMAEVKDWKAVRVDLVVAPDEQFAYAKLGWTGSGMFRRDTRRYAEEERDMLLDNHGLYDLKKGIFLSADSEEEIFGHLDLDYLEPWERNA

SEQ ID NO: 6245 - DNA, 1182 bp, synthetic construct
  misc_feature 1..1182: note = Variant of terminal deoxynucleotidyl transferase
  source 1..1182: mol_type = other DNA
atgcaccatcatcaccatcacgggggctccggccatccggaaggtaataccccggagaaggaggtgccgagcgttatcgcccgtcatgttagtccgtacgcgtgccagcgcaagaccacgctgaataactacaacaaaaagatcaccgacgcgctggagatcatggccgagaactacaagtttaaagagaacctgcaggcgcgcctggaggcccgtcgcgccgcgagtgtcctgaaaagcctgccgttcgaggttaccagcatgaaagacatccaaggtctgccgtgcattaccgacgacgtacgtcctgtgatcgaagagatcatcgaagtaggcgagagcagccgtgttaaagaaatcctcaatgacgagcgctacaaggcctttaagcagttcaccagcgtgttcggtgtgggcgtcaagaccgcggaaaagtggtaccgtatgggccatcgtacgctggaagaagtaaaggccagtaagttcctgaagctgaacaagatgcagaaggcgggcttcctgtactacgaggatctggcgagcggtgttacgaaagaagaaaaagatgccgttctggatatcgtgaaggaaacggtgtggactgttgatccggatgcgctggtgaccatcgtgggcggtttccgccgtggcaaacctcagggccacgacgttgacctgctgatcacgattccgggccgtcctacggatccggagctgctccacaacgtggttgatctgctcaagaagcaaggtctgctgctgtacggggacatccgtgagcgtacgttcgtggaggggcaactgccaaatcctaaacctgaccagctggacaatcatcagaagtgcttcgccattctcaagctgtaccgcccgaaggtggataacagtgcggttgggacgtcgaagaaagtcgacatggctgaggttaaggattggaaagcggttcgtgtggatctggtggtcgctccagatgagcagttcgcctatgcgaaactcggttggacgggcagcggcatgtttcgtcgcgatactcgtcgctacgcggaggaagagcgcgacatgctgctcgacaaccatggtctctacgacctgaaaaagggcatttttctgagtgcggacagcgaagaagagattttcggtcatctggacctggattatctggagccgtgggaacgcaacgcg

SEQ ID NO: 6246 - protein, 394 aa, synthetic construct
  REGION 1..394: note = Variant of terminal deoxynucleotidyl transferase
MHHHHHHGGSGHPEGNTPEKEVPSVIARHVSPYACQRKTTLNNYNKKITDALEIMAENYKFKENLQARLEARRAASVLKSLPFEVTSMKDIQGLPCITDDVRPVIEEIIEVGESSRVKEILNDERYKAFKQFTSVFGVGVKTAEKWYRMGHRTLEEVKASKFLKLNKMQKAGFLYYEDLASGVTKEEKDAVLDIVKETVWTVDPDALVTIVGGFRRGKPQGHDVDLLITIPGRPTDPELLHNVVDLLKKQGLLLYGDIRERTFVEGQLPNPKPDQLDNHQKCFAILKLYRPKVDNSAVGTSKKVDMAEVKDWKAVRVDLVVAPDEQFAYAKLGWTGSGMFRRDTRRYAEEERDMLLDNHGLYDLKKGIFLSADSEEEIFGHLDLDYLEPWERNA

SEQ ID NO: 6247 - DNA, 1182 bp, synthetic construct
  misc_feature 1..1182: note = Variant of terminal deoxynucleotidyl transferase
  source 1..1182: mol_type = other DNA
atgcaccatcatcaccatcacgggggctccggccatccggaaggtaataccccggagaaggaggtgccgagcgttatcgcccgtcatgttagtccgtacgcgtgccagcgcaagaccacgctgaataactacaacaaaaagatcaccgacgcgctggagatcatggccgagaactacaagtttaaagagaacctgcaggcgcgcctggaggcccgtcgcgccgcgagtgtcctgaaaagcctgccgttcgaggttaccagcatgaaagacatccaaggtctgccgtgcattaccgacgacgtacgtcctgtgatcgaagagatcatcgaagtaggcgagagcagccgtgttaaagaaatcctcaatgacgagcgctacaaggcctttaagcagttcaccagcgtgttcggtgtgggcgtcaagaccgcggaaaagtggtaccgtatgggcctccgtacgctggaagaagtaaaggccagtaagttcctgaagctgaacaagatgcagaaggcgggcttcctgtactacgaggatctggcgagcggtgttacgaaagaagaaaaagatgccgttctggatatcgtgaaggaaacggtgtggactgttgatccggatgcgctggtgaccatcgtgggcggtttccgccgtggcaaacctcagggccacgacgttgacctgctgatcacgattccgggccgtcctacggatccggagctgctccacaacgtggttgatctgctcaagaagcaaggtctgctgctgtacggggacatccgtgagtcgacgttcgtggaggggcaactgccaaatcctaaacctgaccagctggacaatcatcagaagtgcttcgccattctcaagctgtaccgcccgaaggtggataacagtgcggttgggacgtcgaagaaagtcgacatggctgaggttaaggattggaaagcggttcgtgtggatctggtggtcgctccagatgagcagttcgcctatgcgaaactcggttggacgggcagcggcatgtttcgtcgcgatactcgtcgctacgcggaggaagagcgcgacatgctgctcgacaaccatggtctctacgacctgaaaaagggcatttttctgagtgcggacagcgaagaagagattttcggtcatctggacctggattatctggagccgtgggaacgcaacgcg

SEQ ID NO: 6248 - protein, 394 aa, synthetic construct
  REGION 1..394: note = Variant of terminal deoxynucleotidyl transferase
MHHHHHHGGSGHPEGNTPEKEVPSVIARHVSPYACQRKTTLNNYNKKITDALEIMAENYKFKENLQARLEARRAASVLKSLPFEVTSMKDIQGLPCITDDVRPVIEEIIEVGESSRVKEILNDERYKAFKQFTSVFGVGVKTAEKWYRMGLRTLEEVKASKFLKLNKMQKAGFLYYEDLASGVTKEEKDAVLDIVKETVWTVDPDALVTIVGGFRRGKPQGHDVDLLITIPGRPTDPELLHNVVDLLKKQGLLLYGDIRESTFVEGQLPNPKPDQLDNHQKCFAILKLYRPKVDNSAVGTSKKVDMAEVKDWKAVRVDLVVAPDEQFAYAKLGWTGSGMFRRDTRRYAEEERDMLLDNHGLYDLKKGIFLSADSEEEIFGHLDLDYLEPWERNA

SEQ ID NO: 6249 - DNA, 1182 bp, synthetic construct
  misc_feature 1..1182: note = Variant of terminal deoxynucleotidyl transferase
  source 1..1182: mol_type = other DNA
atgcaccatcatcaccatcacgggggctccggccatccggaaggtaataccccggagaaggaggtgccgagcgttatcgcccgtcatgttagtccgtacgcgtgccagcgcaagaccacgctgaataactacaacaaaaagatcaccgacgcgctggagatcatggccgagaactacaagtttaaagagaacctgcaggcgcgcctggaggcccgtcgcgccgcgagtgtcctgaaaagcctgccgttcgaggttaccagcatgaaagacatccaaggtctgccgtgcattaccgacgacgtacgtcctgtgatcgaagagatcatcgaagtaggcgagagcagccgtgttaaagaaatcctcaatgacgagcgctacaaggcctttaagcagttcaccagcgtgttcggtgtgggcgtcaagaccgcggaaaagtggtaccgtatgggcctccgtacgctggaagaagtaaaggccagtaagttcctgaagctgaacaagatgcagaaggcgggcttcctgtactacgaggatctggcgagcggtgttacgaaagaagaaaaagatgccgttctggatatcgtgaaggaaacggtgtggactgttgatccggatgcgctggtgaccgtggccggcggtttccgccgtggcaaacctcagggccacgacgttgacctgctgatcacgattccgggccgtcctacggatccggagctgctccacaacgtggttgatctgctcaagaagcaaggtctgctgctgtacggggacatccgtgagcgtacgttcgtggaggggcaactgccaaatcctaaacctgaccagctggacaatcatcagaagtgcttcgccattctcaagctgtaccgcccgaaggtggataacagtgcggttgggacgtcgaagaaagtcgacatggctgaggttaaggattggaaagcggttcgtgtggatctggtggtcgctccagatgagcagttcgcctatgcgaaactcggttggacgggcagcggcatgtttcgtcgcgatactcgtcgctacgcggaggaagagcgcgacatgctgctcgacaaccatggtctctacgacctgaaaaagggcatttttctgagtgcggacagcgaagaagagattttcggtcatctggacctggattatctggagccgtgggaacgcaacgcg

SEQ ID NO: 6250 - protein, 394 aa, synthetic construct
  REGION 1..394: note = Variant of terminal deoxynucleotidyl transferase
MHHHHHHGGSGHPEGNTPEKEVPSVIARHVSPYACQRKTTLNNYNKKITDALEIMAENYKFKENLQARLEARRAASVLKSLPFEVTSMKDIQGLPCITDDVRPVIEEIIEVGESSRVKEILNDERYKAFKQFTSVFGVGVKTAEKWYRMGLRTLEEVKASKFLKLNKMQKAGFLYYEDLASGVTKEEKDAVLDIVKETVWTVDPDALVTVAGGFRRGKPQGHDVDLLITIPGRPTDPELLHNVVDLLKKQGLLLYGDIRERTFVEGQLPNPKPDQLDNHQKCFAILKLYRPKVDNSAVGTSKKVDMAEVKDWKAVRVDLVVAPDEQFAYAKLGWTGSGMFRRDTRRYAEEERDMLLDNHGLYDLKKGIFLSADSEEEIFGHLDLDYLEPWERNA

SEQ ID NO: 6251 - DNA, 1182 bp, synthetic construct
  misc_feature 1..1182: note = Variant of terminal deoxynucleotidyl transferase
  source 1..1182: mol_type = other DNA
atgcaccatcatcaccatcacgggggctccggccatccggaaggtaataccccggagaaggaggtgccgagcgttatcgcccgtcatgttagtccgtacgcgtgccagcgcaagaccacgctgaataactacaacaaaaagatcaccgacgcgctggagatcatggccgagaactacaagtttaaagagaacctgcaggcgcgcctggaggcccgtggtgccgcgagtgtcctgaaaagcctgccgttcgaggttaccagcatgaaagacatccaaggtctgccgtgcattaccgacgacgtacgtcctgtgatcgaagagatcatcgaagtaggcgagagcagccgtgttaaagaaatcctcaatgacgagcgctacaaggcctttaagcagttcaccagcgtgttcggtgtgggcgtcaagaccgcggaaaagtggtaccgtatgggcctccgtacgctggaagaagtaaaggccagtaagttcctgaagctgaacaagatgcagaaggcgggcttcctgtactacgaggatctggcgagcggtgttacgaaagaagaaaaagatgccgttctggatatcgtgaaggaaacggtgtggactgttgatccggatgcgctggtgaccatcgtgggcggtttccgccgtggcaaacctcagggccacgacgttgacctgctgatcacgattccgggccgtcctacggatccggagctgctccacaacgtggttgatctgctcaagaagcaaggtctgctgctgtacggggacatccgtgagcgtacgttcgtggaggggcaactgccaaatcctaaacctgaccagctggacaatcatcagaagtgcttcgccattctcaagctgtaccgcccgaaggtggataacagtgcggttgggacgtcgaagaaagtcgacatggctgaggttaaggattggaaagcggttcgtgtggatctggtggtcgctccagatgagcagttcgcctatgcgaaactcggttggacgggcagcggcatgtttcgtcgcgatactcgtcgctacgcggaggaagagcgcgacatgctgctcgacaaccatggtctctacgacctgaaaaagggcatttttctgagtgcggacagcgaagaagagattttcggtcatctggacctggattatctggagccgtgggaacgcaacgcg

SEQ ID NO: 6252 - protein, 394 aa, synthetic construct
  REGION 1..394: note = Variant of terminal deoxynucleotidyl transferase
MHHHHHHGGSGHPEGNTPEKEVPSVIARHVSPYACQRKTTLNNYNKKITDALEIMAENYKFKENLQARLEARGAASVLKSLPFEVTSMKDIQGLPCITDDVRPVIEEIIEVGESSRVKEILNDERYKAFKQFTSVFGVGVKTAEKWYRMGLRTLEEVKASKFLKLNKMQKAGFLYYEDLASGVTKEEKDAVLDIVKETVWTVDPDALVTIVGGFRRGKPQGHDVDLLITIPGRPTDPELLHNVVDLLKKQGLLLYGDIRERTFVEGQLPNPKPDQLDNHQKCFAILKLYRPKVDNSAVGTSKKVDMAEVKDWKAVRVDLVVAPDEQFAYAKLGWTGSGMFRRDTRRYAEEERDMLLDNHGLYDLKKGIFLSADSEEEIFGHLDLDYLEPWERNA

SEQ ID NO: 6253 - DNA, 1182 bp, synthetic construct
  misc_feature 1..1182: note = Variant of terminal deoxynucleotidyl transferase
  source 1..1182: mol_type = other DNA
atgcaccatcatcaccatcacgggggctccggccatccggaaggtaataccccggagaaggaggtgccgagcgttatcgcccgtcatgttagtccgtacgcgtgccagcgcaagaccacgctgaataactacaacaaaaagatcaccgacgcgctggagatcatggccgagaactacaagtttaaagagaacctggcggcgcgcctggaggcccgtcgcgccgcgagtgtcctgaaaagcctgccgttcgaggttaccagcatgaaagacatccaaggtctgccgtgcattaccgacgacgtacgtcctgtgatcgaagagatcatcgaagtaggcgagagcagccgtgttaaagaaatcctcaatgacgagcgctacaaggcctttaagcagttcaccagcgtgttcggtgtgggcgtcaagaccgcggaaaagtggtaccgtatgggcctccgtacgctggaagaagtaaaggccagtaagttcctgaagctgaacaagatgcagaaggcgggcttcctgtactacgaggatctggcgagcggtgttacgaaagaagaaaaagatgccgttctggatatcgtgaaggaaacggtgtggactgttgatccggatgcgctggtgaccatcgtgggcggtttccgccgtggcaaacctcagggccacgacgttgacctgctgatcacgattccgggccgtcctacggatccggagctgctccacaacgtggttgatctgctcaagaagcaaggtctgctgctgtacggggacatccgtgagcgtacgttcgtggaggggcaactgccaaatcctaaacctgaccagctggacaatcatcagaagtgcttcgccattctcaagctgtaccgcccgaaggtggataacagtgcggttgggacgtcgaagaaagtcgacatggctgaggttaaggattggaaagcggttcgtgtggatctggtggtcgctccagatgagcagttcgcctatgcgaaactcggttggacgggcagcggcatgtttcgtcgcgatactcgtcgctacgcggaggaagagcgcgacatgctgctcgacaaccatggtctctacgacctgaaaaagggcatttttctgagtgcggacagcgaagaagagattttcggtcatctggacctggattatctggagccgtgggaacgcaacgcg

SEQ ID NO: 6254 - protein, 394 aa, synthetic construct
  REGION 1..394: note = Variant of terminal deoxynucleotidyl transferase
MHHHHHHGGSGHPEGNTPEKEVPSVIARHVSPYACQRKTTLNNYNKKITDALEIMAENYKFKENLAARLEARRAASVLKSLPFEVTSMKDIQGLPCITDDVRPVIEEIIEVGESSRVKEILNDERYKAFKQFTSVFGVGVKTAEKWYRMGLRTLEEVKASKFLKLNKMQKAGFLYYEDLASGVTKEEKDAVLDIVKETVWTVDPDALVTIVGGFRRGKPQGHDVDLLITIPGRPTDPELLHNVVDLLKKQGLLLYGDIRERTFVEGQLPNPKPDQLDNHQKCFAILKLYRPKVDNSAVGTSKKVDMAEVKDWKAVRVDLVVAPDEQFAYAKLGWTGSGMFRRDTRRYAEEERDMLLDNHGLYDLKKGIFLSADSEEEIFGHLDLDYLEPWERNA

SEQ ID NO: 6255 - DNA, 1182 bp, synthetic construct
  misc_feature 1..1182: note = Variant of terminal deoxynucleotidyl transferase
  source 1..1182: mol_type = other DNA
atgcaccatcatcaccatcacgggggctccggccatccggaaggtaataccccggagaaggaggtgccgagcgttatcgcccgtcatgttagtccgtacgcgtgccagcgcaagaccacgctgaataactacaacaaaaagatcaccgacgcgctggagatcatggccgagaactacaagtttaaagagaacctgcaggcgcgcctggaggcccgtcgcgccgcgagtgtcctgaaaagcctgccgttcgaggttaccagcatgaaagacatccaaggtctgccgtgcattaccgacgacgtacgtcctgtgatcgaagagatcatcgaagtaggcgagagcagccgtgttaaagaaatcctcaatgacgagcgctacaaggcctttaagcagttcaccagcgtgttcggtgtgggcgtcaagaccgcggaaaagtggtaccgtatgggcctccgtacgctggaagaagtaaaggccagtaagttcctgaagctgaacaagatgcagaaggcgggcttcctgtactacgaggatctggcgagcggtgttacgaaagaagaaaaagatgccgttctggatatcgtgaaggaaacggtgtggactgttgatccggatgcgctggtgaccatcgtgggcggtttccgccgtggcaaacctcagggccacgacgttgacctgctgatcacgattccgggccgtcctacggatccggagctgctccacaacgtggttgatctgctcaagaagcaaggtctgctgctgtacggggacatccgtgagcgtacgttcgtggaggggcaactgccaaatcctaaacctgaccagctggacaatcatcagaagtgcttcgccattctcaagctgtaccgcccgaaggtggataacagtgcggttgggacgtcgaagaaagtcgacatggctgaggttaaggattggaaagcggttcgtgtggatctggtggtcgctccagaggagcagttcgcctatgcgaaactcggttggacgggcagcggcatgtttcgtcgcgatactcgtcgctacgcggaggaagagcgcgacatgctgctcgacaaccatggtctctacgacctgaaaaagggcatttttctgagtgcggacagcgaagaagagattttcggtcatctggacctggattatctggagccgtgggaacgcaacgcg

SEQ ID NO: 6256 - protein, 394 aa, synthetic construct
  REGION 1..394: note = Variant of terminal deoxynucleotidyl transferase
MHHHHHHGGSGHPEGNTPEKEVPSVIARHVSPYACQRKTTLNNYNKKITDALEIMAENYKFKENLQARLEARRAASVLKSLPFEVTSMKDIQGLPCITDDVRPVIEEIIEVGESSRVKEILNDERYKAFKQFTSVFGVGVKTAEKWYRMGLRTLEEVKASKFLKLNKMQKAGFLYYEDLASGVTKEEKDAVLDIVKETVWTVDPDALVTIVGGFRRGKPQGHDVDLLITIPGRPTDPELLHNVVDLLKKQGLLLYGDIRERTFVEGQLPNPKPDQLDNHQKCFAILKLYRPKVDNSAVGTSKKVDMAEVKDWKAVRVDLVVAPEEQFAYAKLGWTGSGMFRRDTRRYAEEERDMLLDNHGLYDLKKGIFLSADSEEEIFGHLDLDYLEPWERNA

SEQ ID NO: 6257 - DNA, 1182 bp, synthetic construct
  misc_feature 1..1182: note = Variant of terminal deoxynucleotidyl transferase
  source 1..1182: mol_type = other DNA
atgcaccatcatcaccatcacgggggctccggccatccggaaggtaataccccggagaaggaggtgccgagcgttatcgcccgtcatgttagtccgtacgcgtgccagcgcaagaccacgctgaataactacaacaaaaagatcaccgacgcgctggagatcatggccgagaactacaagtttaaagagaacctgcaggcgcgcctggaggcccgtcgcgccgcgagtgtcctgaaaagcctgccgttcgaggttaccagcatgaaagacatccaaggtctgccgtgcattaccgacgacgtacgtcctgtgatcgaagagatcatcgaagtaggcgagagcagccgtgttaaagaaatcctcaatgacgagcgctacaaggcctttaagcagttcaccagcgtgttcggtgtgggcgtcaagaccgcggaaaagtggtaccgtatgggcctccgtacgctggaagaagtaaaggccagtaagttcctgaagctgaacaagatgcagaaggcgggcttcctgtactacgaggatctggcgagcggtgttacgaaagaagaaaaagatgccgttctggatatcgtgaaggaaacggtgtggactgttgatccggatgcgctggtgaccatcgtgggcggtttccgccgtggcaaacctcagggccacgacgttgacctgctgatcacgattccgggccgtcctacggatccggagctgctccacaacgtggttgatctgctcaagaagcaaggtctgctgctgtacggggacatccgtgagcgtacgttcgtggaggggcaactgccaaatcctaaactggaccagctggacaatcatcagaagtgcttcgccattctcaagctgtaccgcccgaaggtggataacagtgcggttgggacgtcgaagaaagtcgacatggctgaggttaaggattggaaagcggttcgtgtggatctggtggtcgctccagatgagcagttcgcctatgcgaaactcggttggacgggcagcggcatgtttcgtcgcgatactcgtcgctacgcggaggaagagcgcgacatgctgctcgacaaccatggtctctacgacctgaaaaagggcatttttctgagtgcggacagcgaagaagagattttcggtcatctggacctggattatctggagccgtgggaacgcaacgcg

SEQ ID NO: 6258 - protein, 394 aa, synthetic construct
  REGION 1..394: note = Variant of terminal deoxynucleotidyl transferase
MHHHHHHGGSGHPEGNTPEKEVPSVIARHVSPYACQRKTTLNNYNKKITDALEIMAENYKFKENLQARLEARRAASVLKSLPFEVTSMKDIQGLPCITDDVRPVIEEIIEVGESSRVKEILNDERYKAFKQFTSVFGVGVKTAEKWYRMGLRTLEEVKASKFLKLNKMQKAGFLYYEDLASGVTKEEKDAVLDIVKETVWTVDPDALVTIVGGFRRGKPQGHDVDLLITIPGRPTDPELLHNVVDLLKKQGLLLYGDIRERTFVEGQLPNPKLDQLDNHQKCFAILKLYRPKVDNSAVGTSKKVDMAEVKDWKAVRVDLVVAPDEQFAYAKLGWTGSGMFRRDTRRYAEEERDMLLDNHGLYDLKKGIFLSADSEEEIFGHLDLDYLEPWERNA

SEQ ID NO: 6259 - DNA, 1182 bp, synthetic construct
  misc_feature 1..1182: note = Variant of terminal deoxynucleotidyl transferase
  source 1..1182: mol_type = other DNA
atgcaccatcatcaccatcacgggggctccggccatccggaaggtaataccccggagaaggaggtgccgagcgttatcgcccgtcatgttagtccgtacgcgtgccagcgcaagaccacgctgaataactacaacaaaaagatcaccgacgcgctggagatcatggccgagaactacaagtttaaagagaacatgcaggcgcgcctggaggcccgtcgcgccgcgagtgtcctgaaaagcctgccgttcgaggttaccagcatgaaagacatccaaggtctgccgtgcattaccgacgacgtacgtcctgtgatcgaagagatcatcgaagtaggcgagagcagccgtgttaaagaaatcctcaatgacgagcgctacaaggcctttaagcagttcaccagcgtgttcggtgtgggcgtcaagaccgcggaaaagtggtaccgtatgggcctccgtacgctggaagaagtaaaggccagtaagttcctgaagctgaacaagatgcagaaggcgggcttcctgtactacgaggatctggcgagcggtgttacgaaagaagaaaaagatgccgttctggatatcgtgaaggaaacggtgtggactgttgatccggatgcgctggtgaccatcgtgggcggtttccgccgtggcaaacctcagggccacgacgttgacctgctgatcacgattccgggccgtcctacggatccggagctgctccacaacgtggttgatctgctcaagaagcaaggtctgctgctgtacggggacatccgtgagcgtacgttcgtggaggggcaactgccaaatcctaaacctgaccagctggacaatcatcagaagtgcttcgccattctcaagctgtaccgcccgaaggtggataacagtgcggttgggacgtcgaagaaagtcgacatggctgaggttaaggattggaaagcggttcgtgtggatctggtggtcgctccagatgagcagttcgcctatgcgaaactcggttggacgggcagcggcatgtttcgtcgcgatactcgtcgctacgcggaggaagagcgcgacatgctgctcgacaaccatggtctctacgacctgaaaaagggcatttttctgagtgcggacagcgaagaagagattttcggtcatctggacctggattatctggagccgtgggaacgcaacgcg

SEQ ID NO: 6260 - protein, 394 aa, synthetic construct
  REGION 1..394: note = Variant of terminal deoxynucleotidyl transferase
MHHHHHHGGSGHPEGNTPEKEVPSVIARHVSPYACQRKTTLNNYNKKITDALEIMAENYKFKENMQARLEARRAASVLKSLPFEVTSMKDIQGLPCITDDVRPVIEEIIEVGESSRVKEILNDERYKAFKQFTSVFGVGVKTAEKWYRMGLRTLEEVKASKFLKLNKMQKAGFLYYEDLASGVTKEEKDAVLDIVKETVWTVDPDALVTIVGGFRRGKPQGHDVDLLITIPGRPTDPELLHNVVDLLKKQGLLLYGDIRERTFVEGQLPNPKPDQLDNHQKCFAILKLYRPKVDNSAVGTSKKVDMAEVKDWKAVRVDLVVAPDEQFAYAKLGWTGSGMFRRDTRRYAEEERDMLLDNHGLYDLKKGIFLSADSEEEIFGHLDLDYLEPWERNA

SEQ ID NO: 6261 - DNA, 1182 bp, synthetic construct
  misc_feature 1..1182: note = Variant of terminal deoxynucleotidyl transferase
  source 1..1182: mol_type = other DNA
atgcaccatcatcaccatcacgggggctccggccatccggaaggtaataccccggagaaggaggtgccgagcgttatcgcccgtcatgttagtccgtacgcgtgccagcgcaagaccacgctgaataactacaacaaaaagatcaccgacgcgctggagatcatggccgagaactacaagtttaaagagaacctgcaggcgcgcctggaggcccgtcgcgccgcgagtgtcctgaaaagcctgccgttcgaggttaccagcatgaaagacatccaaggtctgccgtgcattaccgacgacgtacgtcctgtgatcgaagagatcatcgaagtaggcgagagcagccgtgttaaagaaatcctcaatgacgagcgctacaaggcctttaagcagttcaccagcgtgttcggtgtgggcactaagaccgcggaaaagtggtaccgtatgggcctccgtacgctggaagaagtaaaggccagtaagttcctgaagctgaacaagatgcagaaggcgggcttcctgtactacgaggatctggcgagcggtgttacgaaagaagaaaaagatgccgttctggatatcgtgaaggaaacggtgtggactgttgatccggatgcgctggtgaccatcgtgggcggtttccgccgtggcaaacctcagggccacgacgttgacctgctgatcacgattccgggccgtcctacggatccggagctgctccacaacgtggttgatctgctcaagaagcaaggtctgctgctgtacggggacatccgtgagcgtacgttcgtggaggggcaactgccaaatcctaaacctgaccagctggacaatcatcagaagtgcttcgccattctcaagctgtaccgcccgaaggtggataacagtgcggttgggacgtcgaagaaagtcgacatggctgaggttaaggattggaaagcggttcgtgtggatctggtggtcgctccagatgagcagttcgcctatgcgaaactcggttggacgggcagcggcatgtttcgtcgcgatactcgtcgctacgcggaggaagagcgcgacatgctgctcgacaaccatggtctctacgacctgaaaaagggcatttttctgagtgcggacagcgaagaagagattttcggtcatctggacctggattatctggagccgtgggaacgcaacgcg

SEQ ID NO: 6262 - protein, 394 aa, synthetic construct
  REGION 1..394: note = Variant of terminal deoxynucleotidyl transferase
MHHHHHHGGSGHPEGNTPEKEVPSVIARHVSPYACQRKTTLNNYNKKITDALEIMAENYKFKENLQARLEARRAASVLKSLPFEVTSMKDIQGLPCITDDVRPVIEEIIEVGESSRVKEILNDERYKAFKQFTSVFGVGTKTAEKWYRMGLRTLEEVKASKFLKLNKMQKAGFLYYEDLASGVTKEEKDAVLDIVKETVWTVDPDALVTIVGGFRRGKPQGHDVDLLITIPGRPTDPELLHNVVDLLKKQGLLLYGDIRERTFVEGQLPNPKPDQLDNHQKCFAILKLYRPKVDNSAVGTSKKVDMAEVKDWKAVRVDLVVAPDEQFAYAKLGWTGSGMFRRDTRRYAEEERDMLLDNHGLYDLKKGIFLSADSEEEIFGHLDLDYLEPWERNA

SEQ ID NO: 6263 - DNA, 1182 bp, synthetic construct
  misc_feature 1..1182: note = Variant of terminal deoxynucleotidyl transferase
  source 1..1182: mol_type = other DNA
atgcaccatcatcaccatcacgggggctccggccatccggaaggtaataccccggagaaggaggtgccgagcgttatcgcccgtcatgttagtccgtacgcgtgccagcgcaagaccacgctgaataactacaacaaaaagatcaccgacgcgctggagatcatggccgagaactacaagtttaaagagaacctgcaggcgcgcctggaggcccgtcgcgccgcgagtgtcctgaaaagcctgccgttcgaggttaccagcatgaaagacatccaaggtctgccgtgcattaccgacgacgtacgtcctgtgatcgaagagatcatcgaagtaggcgagagcagccgtgttaaagaaatcctcaatgacgagcgctacaaggcctttaagcagttcaccagcgtgttcggtgtgggcgtcaagaccgcggaaaagtggtaccgtatgggcctccgtacgctggaagaagtaaaggccagtaagttcctgaagctgaacaagatgcagaaggcgggcttcctgtactacgaggatctggcgagcggtgttacgaaagaagaaaaagatgccgttctggatatcgtgaaggaaacggtgtggactgttgatccggatgcgctggtgaccatcgtgggcggtttccgccgtggcaaacctcagggccacgacgttgacctgctgatcacgattccgggccgtcctacggatccggagctgctccacaacgtggttgatctgctcaagaagcaaggtctgctgctgtacggggacatccgtgagcgtacgttcgtggaggggcaactgccaaatcctaaacctgaccagctggacaatcatcagaagtgcttcgccattctcaagctgtaccgtccgactgtggataacagtgcggttgggacgtcgaagaaagtcgacatggctgaggttaaggattggaaagcggttcgtgtggatctggtggtcgctccagatgagcagttcgcctatgcgaaactcggttggacgggcagcggcatgtttcgtcgcgatactcgtcgctacgcggaggaagagcgcgacatgctgctcgacaaccatggtctctacgacctgaaaaagggcatttttctgagtgcggacagcgaagaagagattttcggtcatctggacctggattatctggagccgtgggaacgcaacgcg

SEQ ID NO: 6264 - protein, 394 aa, synthetic construct
  REGION 1..394: note = Variant of terminal deoxynucleotidyl transferase
MHHHHHHGGSGHPEGNTPEKEVPSVIARHVSPYACQRKTTLNNYNKKITDALEIMAENYKFKENLQARLEARRAASVLKSLPFEVTSMKDIQGLPCITDDVRPVIEEIIEVGESSRVKEILNDERYKAFKQFTSVFGVGVKTAEKWYRMGLRTLEEVKASKFLKLNKMQKAGFLYYEDLASGVTKEEKDAVLDIVKETVWTVDPDALVTIVGGFRRGKPQGHDVDLLITIPGRPTDPELLHNVVDLLKKQGLLLYGDIRERTFVEGQLPNPKPDQLDNHQKCFAILKLYRPTVDNSAVGTSKKVDMAEVKDWKAVRVDLVVAPDEQFAYAKLGWTGSGMFRRDTRRYAEEERDMLLDNHGLYDLKKGIFLSADSEEEIFGHLDLDYLEPWERNA

SEQ ID NO: 6265 - DNA, 1182 bp, synthetic construct
  misc_feature 1..1182: note = Variant of terminal deoxynucleotidyl transferase
  source 1..1182: mol_type = other DNA
atgcaccatcatcaccatcacgggggctccggccatccggaaggtaataccccggagaaggaggtgccgagcgttatcgcccgtcatgttagtccgtacgcgtgccagcgcaagaccacgctgaataactacaacaaaaagatcaccgacgcgctggagatcatggccgagaactacaagtttaaagagaacctgcaggcgcgcctggaggcccgtcgcgccgcgagtgtcctgaaaagcctgccgttcgaggttaccagcatgaaagacatccaaggtctgccgtgcattaccgacgacgtacgtcctgtgatcgaagagatcatcgaagtaggcgagagcagccgtgttaaagaaatcctcaatgacgagcgctacaaggcctttaagcagttcaccagcgtgttcggtgtgggcgtcaagaccgcggaaaagtggtaccgtatgggcctccgtacgctggaagaagtaaaggccagtaagttcctgaagctgaacaagatgcagaaggcgggcttcctgtactacgaggatctggcgagcggtgttacgaaagaagaaaaagatgccgttctggatatcgtgaaggaaacggtgtggactgttgatccggatgcgctggtgaccatcgtgggcggtttccgccgtggcaaaactcagggccacgacgttgacctgctgatcacgattccgggccgtcctacggatccggagctgctccacaacgtggttgatctgctcaagaagcaaggtctgctgctgtacggggacatccgtgagcgtacgttcgtggaggggcaactgccaaatcctaaacctgaccagctggacaatcatcagaagtgcttcgccattctcaagctgtaccgcccgaaggtggataacagtgcggttgggacgtcgaagaaagtcgacatggctgaggttaaggattggaaagcggttcgtgtggatctggtggtcgctccagatgagcagttcgcctatgcgaaactcggttggacgggcagcggcatgtttcgtcgcgatactcgtcgctacgcggaggaagagcgcgacatgctgctcgacaaccatggtctctacgacctgaaaaagggcatttttctgagtgcggacagcgaagaagagattttcggtcatctggacctggattatctggagccgtgggaacgcaacgcg

SEQ ID NO: 6266 - protein, 394 aa, synthetic construct
  REGION 1..394: note = Variant of terminal deoxynucleotidyl transferase
MHHHHHHGGSGHPEGNTPEKEVPSVIARHVSPYACQRKTTLNNYNKKITDALEIMAENYKFKENLQARLEARRAASVLKSLPFEVTSMKDIQGLPCITDDVRPVIEEIIEVGESSRVKEILNDERYKAFKQFTSVFGVGVKTAEKWYRMGLRTLEEVKASKFLKLNKMQKAGFLYYEDLASGVTKEEKDAVLDIVKETVWTVDPDALVTIVGGFRRGKTQGHDVDLLITIPGRPTDPELLHNVVDLLKKQGLLLYGDIRERTFVEGQLPNPKPDQLDNHQKCFAILKLYRPKVDNSAVGTSKKVDMAEVKDWKAVRVDLVVAPDEQFAYAKLGWTGSGMFRRDTRRYAEEERDMLLDNHGLYDLKKGIFLSADSEEEIFGHLDLDYLEPWERNA

SEQ ID NO: 6267 - DNA, 1182 bp, synthetic construct
  misc_feature 1..1182: note = Variant of terminal deoxynucleotidyl transferase
  source 1..1182: mol_type = other DNA
atgcaccatcatcaccatcacgggggctccggccatccggaaggtaataccccggagaaggaggtgccgagcgttatcgcccgtcatgttagtccgtacgcgtgccagcgcaagaccacgctgaataactacaacaaaaagatcaccgacgcgctggagatcatggccgagaactacaagtttaaagagaacctgcaggcgcgcctggaggcccgtcgcgccgcgagtgtcctgaaaagcctgccgttcgaggttaccagcatgaaagacatccaaggtctgccgtgcattaccgacgacgtacgtcctgtgatcgaagagatcatcgaagtaggcgagagcagccgtgttaaagaaatcctcaatgacgagcgctacaaggcctttaagcagttcaccagcgtgttcggtgtgggcgtcaagaccgcggaaaagtggtaccgtatgggcctccgtacgctggaagaagtaaaggccagtaagttcctgaagctgaacaagatgcagaaggcgggcttcctgtactacgaggatctggcgagcggtgttacgaaagaagaaaaagatgccgttctggatatcgtgaaggaaacggtgtggactgttgatccggatgcgctggtgaccatcgtgggcggtttccgccgtggcaaacctcagggccacgacgttgacctgctgatcacgattccgggccgtcctacggatccggagctgctccacaacgtggttgatctgctcaagaagcaaggtctgctgctgtacggggacatccgtgagcgtacgttcgtggaggggcaactgccaaatcctaaacctgaccagctggacaatcatcagaagtgcttcgccattctcaagctgtaccgtccggatgtggataacagtgcggttgggacgtcgaagaaagtcgacatggctgaggttaaggattggaaagcggttcgtgtggatctggtggtcgctccagatgagcagttcgcctatgcgaaactcggttggacgggcagcggcatgtttcgtcgcgatactcgtcgctacgcggaggaagagcgcgacatgctgctcgacaaccatggtctctacgacctgaaaaagggcatttttctgagtgcggacagcgaagaagagattttcggtcatctggacctggattatctggagccgtgggaacgcaacgcg

SEQ ID NO: 6268 - protein, 394 aa, synthetic construct
  REGION 1..394: note = Variant of terminal deoxynucleotidyl transferase
MHHHHHHGGSGHPEGNTPEKEVPSVIARHVSPYACQRKTTLNNYNKKITDALEIMAENYKFKENLQARLEARRAASVLKSLPFEVTSMKDIQGLPCITDDVRPVIEEIIEVGESSRVKEILNDERYKAFKQFTSVFGVGVKTAEKWYRMGLRTLEEVKASKFLKLNKMQKAGFLYYEDLASGVTKEEKDAVLDIVKETVWTVDPDALVTIVGGFRRGKPQGHDVDLLITIPGRPTDPELLHNVVDLLKKQGLLLYGDIRERTFVEGQLPNPKPDQLDNHQKCFAILKLYRPDVDNSAVGTSKKVDMAEVKDWKAVRVDLVVAPDEQFAYAKLGWTGSGMFRRDTRRYAEEERDMLLDNHGLYDLKKGIFLSADSEEEIFGHLDLDYLEPWERNA

SEQ ID NO: 6269 - DNA, 1182 bp, synthetic construct
  misc_feature 1..1182: note = Variant of terminal deoxynucleotidyl transferase
  source 1..1182: mol_type = other DNA
atgcaccatcatcaccatcacgggggctccggccatccggaaggtaataccccggagaaggaggtgccgagcgttatcgcccgtcatgttagtccgtacgcgtgccagcgcaagaccacgctgaataactacaacaaaaagatcaccgacgcgctggaaatcatggccgagaaccataagtttaaagagaacctgcaggcgcgcctggaggcccgtcgcgccgcgagtgtcctgaaaagcctgccgttcgaggttaccagcatgaaagacatccaaggtctgccgtgcattaccgacgacgtacgtcctgtgatcgaagagatcatcgaagtaggcgagagcagccgtgttaaagaaatcctcaatgacgagcgctacaaggcctttaagcagttcaccagcgtgttcggtgtgggcgtcaagaccgcggaaaagtggtaccgtatgggcctccgtacgctggaagaagtaaaggccagtaagttcctgaagctgaacaagatgcagaaggcgggcttcctgtactacgaggatctggcgagcggtgttacgaaagaagaaaaagatgccgttctggatatcgtgaaggaaacggtgtggactgttgatccggatgcgctggtgaccatcgtgggcggtttccgccgtggcaaacctcagggccacgacgttgacctgctgatcacgattccgggccgtcctacggatccggagctgctccacaacgtggttgatctgctcaagaagcaaggtctgctgctgtacggggacatccgtgagcgtacgttcgtggaggggcaactgccaaatcctaaacctgaccagctggacaatcatcagaagtgcttcgccattctcaagctgtaccgcccgaaggtggataacagtgcggttgggacgtcgaagaaagtcgacatggctgaggttaaggattggaaagcggttcgtgtggatctggtggtcgctccagatgagcagttcgcctatgcgaaactcggttggacgggcagcggcatgtttcgtcgcgatactcgtcgctacgcggaggaagagcgcgacatgctgctcgacaaccatggtctctacgacctgaaaaagggcatttttctgagtgcggacagcgaagaagagattttcggtcatctggacctggattatctggagccgtgggaacgcaacgcg

SEQ ID NO: 6270 - protein, 394 aa, synthetic construct
  REGION 1..394: note = Variant of terminal deoxynucleotidyl transferase
MHHHHHHGGSGHPEGNTPEKEVPSVIARHVSPYACQRKTTLNNYNKKITDALEIMAENHKFKENLQARLEARRAASVLKSLPFEVTSMKDIQGLPCITDDVRPVIEEIIEVGESSRVKEILNDERYKAFKQFTSVFGVGVKTAEKWYRMGLRTLEEVKASKFLKLNKMQKAGFLYYEDLASGVTKEEKDAVLDIVKETVWTVDPDALVTIVGGFRRGKPQGHDVDLLITIPGRPTDPELLHNVVDLLKKQGLLLYGDIRERTFVEGQLPNPKPDQLDNHQKCFAILKLYRPKVDNSAVGTSKKVDMAEVKDWKAVRVDLVVAPDEQFAYAKLGWTGSGMFRRDTRRYAEEERDMLLDNHGLYDLKKGIFLSADSEEEIFGHLDLDYLEPWERNA

SEQ ID NO: 6271 - DNA, 1182 bp, synthetic construct
  misc_feature 1..1182: note = Variant of terminal deoxynucleotidyl transferase
  source 1..1182: mol_type = other DNA
atgcaccatcatcaccatcacgggggctccggccatccggaaggtaataccccggagaaggaggtgccgagcgttatcgcccgtcatgttagtccgtacgcgtgccagcgcaagaccacgctgaataactacaacaaaaagatcaccgacgcgctggagatcatggccgagaactacaagtttaaagagaacctgaatgcgcgcctggaggcccgtcgcgccgcgagtgtcctgaaaagcctgccgttcgaggttaccagcatgaaagacatccaaggtctgccgtgcattaccgacgacgtacgtcctgtgatcgaagagatcatcgaagtaggcgagagcagccgtgttaaagaaatcctcaatgacgagcgctacaaggcctttaagcagttcaccagcgtgttcggtgtgggcgtcaagaccgcggaaaagtggtaccgtatgggcctccgtacgctggaagaagtaaaggccagtaagttcctgaagctgaacaagatgcagaaggcgggcttcctgtactacgaggatctggcgagcggtgttacgaaagaagaaaaagatgccgttctggatatcgtgaaggaaacggtgtggactgttgatccggatgcgctggtgaccatcgtgggcggtttccgccgtggcaaacctcagggccacgacgttgacctgctgatcacgattccgggccgtcctacggatccggagctgctccacaacgtggttgatctgctcaagaagcaaggtctgctgctgtacggggacatccgtgagcgtacgttcgtggaggggcaactgccaaatcctaaacctgaccagctggacaatcatcagaagtgcttcgccattctcaagctgtaccgcccgaaggtggataacagtgcggttgggacgtcgaagaaagtcgacatggctgaggttaaggattggaaagcggttcgtgtggatctggtggtcgctccagatgagcagttcgcctatgcgaaactcggttggacgggcagcggcatgtttcgtcgcgatactcgtcgctacgcggaggaagagcgcgacatgctgctcgacaaccatggtctctacgacctgaaaaagggcatttttctgagtgcggacagcgaagaagagattttcggtcatctggacctggattatctggagccgtgggaacgcaacgcg

SEQ ID NO: 6272 - protein, 394 aa, synthetic construct
  REGION 1..394: note = Variant of terminal deoxynucleotidyl transferase
MHHHHHHGGSGHPEGNTPEKEVPSVIARHVSPYACQRKTTLNNYNKKITDALEIMAENYKFKENLNARLEARRAASVLKSLPFEVTSMKDIQGLPCITDDVRPVIEEIIEVGESSRVKEILNDERYKAFKQFTSVFGVGVKTAEKWYRMGLRTLEEVKASKFLKLNKMQKAGFLYYEDLASGVTKEEKDAVLDIVKETVWTVDPDALVTIVGGFRRGKPQGHDVDLLITIPGRPTDPELLHNVVDLLKKQGLLLYGDIRERTFVEGQLPNPKPDQLDNHQKCFAILKLYRPKVDNSAVGTSKKVDMAEVKDWKAVRVDLVVAPDEQFAYAKLGWTGSGMFRRDTRRYAEEERDMLLDNHGLYDLKKGIFLSADSEEEIFGHLDLDYLEPWERNA

SEQ ID NO: 6273 - DNA, 1182 bp, synthetic construct
  misc_feature 1..1182: note = Variant of terminal deoxynucleotidyl transferase
  source 1..1182: mol_type = other DNA
atgcaccatcatcaccatcacgggggctccggccatccggaaggtaataccccggagaaggaggtgccgagcgttatcgcccgtcatgttagtccgtacgcgtgccagcgcaagaccacgctgaataactacaacaaaaagatcaccgacgcgctggagatcatggccgagaactacaagtttaaagagaacctgcaggcgcgcctggaggcccgtcgcgccgcgagtgtcctgaaaagcctgccgttcgaggttaccagcatgaaagacatccaaggtctgccgtgcattaccgacgacgtacgtcctgtgatcgaagagatcatcgaagtaggcgagagcagccgtgttaaagaaatcctcaatgacgagcgctacaaggcctttaagcagttcaccagcgtgttcggtgtgggcgtcaagaccgcggaaaagtggtaccgtattggcctccgtacgctggaagaagtaaaggccagtaagttcctgaagctgaacaagatgcagaaggcgggcttcctgtactacgaggatctggcgagcggtgttacgaaagaagaaaaagatgccgttctggatatcgtgaaggaaacggtgtggactgttgatccggatgcgctggtgaccatcgtgggcggtttccgccgtggcaaacctcagggccacgacgttgacctgctgatcacgattccgggccgtcctacggatccggagctgctccacaacgtggttgatctgctcaagaagcaaggtctgctgctgtacggggacatccgtgagcgtacgttcgtggaggggcaactgccaaatcctaaacctgaccagctggacaatcatcagaagtgcttcgccattctcaagctgtaccgcccgaaggtggataacagtgcggttgggacgtcgaagaaagtcgacatggctgaggttaaggattggaaagcggttcgtgtggatctggtggtcgctccagatgagcagttcgcctatgcgaaactcggttggacgggcagcggcatgtttcgtcgcgatactcgtcgctacgcggaggaagagcgcgacatgctgctcgacaaccatggtctctacgacctgaaaaagggcatttttctgagtgcggacagcgaagaagagattttcggtcatctggacctggattatctggagccgtgggaacgcaacgcg

SEQ ID NO: 6274 - protein, 394 aa, synthetic construct
  REGION 1..394: note = Variant of terminal deoxynucleotidyl transferase
MHHHHHHGGSGHPEGNTPEKEVPSVIARHVSPYACQRKTTLNNYNKKITDALEIMAENYKFKENLQARLEARRAASVLKSLPFEVTSMKDIQGLPCITDDVRPVIEEIIEVGESSRVKEILNDERYKAFKQFTSVFGVGVKTAEKWYRIGLRTLEEVKASKFLKLNKMQKAGFLYYEDLASGVTKEEKDAVLDIVKETVWTVDPDALVTIVGGFRRGKPQGHDVDLLITIPGRPTDPELLHNVVDLLKKQGLLLYGDIRERTFVEGQLPNPKPDQLDNHQKCFAILKLYRPKVDNSAVGTSKKVDMAEVKDWKAVRVDLVVAPDEQFAYAKLGWTGSGMFRRDTRRYAEEERDMLLDNHGLYDLKKGIFLSADSEEEIFGHLDLDYLEPWERNA

SEQ ID NO: 6275 - DNA, 1182 bp, synthetic construct
  misc_feature 1..1182: note = Variant of terminal deoxynucleotidyl transferase
  source 1..1182: mol_type = other DNA
atgcaccatcatcaccatcacgggggctccggccatccggaaggtaataccccggagaaggaggtgccgagcgttatcgcccgtcatgttagtccgtacgcgtgccagcgcaagaccacgctgaataactacaacaaaaagatcaccgacgcgctggagatcatggccgagaactacaagtttaaagagaacctgcaggcgcgcctggaggcccgtcgcgccgcgagtgtcctgaaaagcctgccgttcgaggttaccagcatgaaagacatccaaggtctgccgtgcattaccgacgacgtacgtcctgtgatcgaagagatcatcgaagtaggcgagagcagccgtgttaaagaaatcctcaatgacgagcgctacaaggcctttaagcagttcaccagcgtgttcggtgtgggcgtcaagaccgcggaaaagtggtaccgtatgggcctccgtacgctggaagaagtaaaggccagtaagttcctgaagctgaacaagatgcagaaggcgggcttcctgtactacgaggatctggcgagcggtgttacgaaagaagaaaaagatgccgttctggatatcgtgaaggaaacggtgtggactgttgatccggatgcgctggtgaccatcgtgggcggtttccgccgtggcaaacctcagggccacgacgttgacctgctgatcacgattccgggccgtcctacggatccggagctgctccacaacgtggttgatctgctcaagaagcaaggtctgctgctgtacggggacatccgtgagcgtacgttcgtggaggggcaactgccaaatcctcggcctgaccagctggacaatcatcagaagtgcttcgccattctcaagctgtaccgcccgaaggtggataacagtgcggttgggacgtcgaagaaagtcgacatggctgaggttaaggattggaaagcggttcgtgtggatctggtggtcgctccagatgagcagttcgcctatgcgaaactcggttggacgggcagcggcatgtttcgtcgcgatactcgtcgctacgcggaggaagagcgcgacatgctgctcgacaaccatggtctctacgacctgaaaaagggcatttttctgagtgcggacagcgaagaagagattttcggtcatctggacctggattatctggagccgtgggaacgcaacgcg

SEQ ID NO: 6276 - protein, 394 aa, synthetic construct
  REGION 1..394: note = Variant of terminal deoxynucleotidyl transferase
MHHHHHHGGSGHPEGNTPEKEVPSVIARHVSPYACQRKTTLNNYNKKITDALEIMAENYKFKENLQARLEARRAASVLKSLPFEVTSMKDIQGLPCITDDVRPVIEEIIEVGESSRVKEILNDERYKAFKQFTSVFGVGVKTAEKWYRMGLRTLEEVKASKFLKLNKMQKAGFLYYEDLASGVTKEEKDAVLDIVKETVWTVDPDALVTIVGGFRRGKPQGHDVDLLITIPGRPTDPELLHNVVDLLKKQGLLLYGDIRERTFVEGQLPNPRPDQLDNHQKCFAILKLYRPKVDNSAVGTSKKVDMAEVKDWKAVRVDLVVAPDEQFAYAKLGWTGSGMFRRDTRRYAEEERDMLLDNHGLYDLKKGIFLSADSEEEIFGHLDLDYLEPWERNA

SEQ ID NO: 6277 - DNA, 1182 bp, synthetic construct
  misc_feature 1..1182: note = Variant of terminal deoxynucleotidyl transferase
  source 1..1182: mol_type = other DNA
atgcaccatcatcaccatcacgggggctccggccatccggaaggtaataccccggagaaggaggtgccgagcgttatcgcccgtcatgttagtccgtacgcgtgccagcgcaagaccacgctgaataactacaacaaaaagatcaccgacgcgctggagatcatggccgagaactacaagtttaaagagaacctgcaggcgcgcctggaggcccgtcgcgccgcgagtgtcctgaaaagcctgccgttcgaggttaccagcatgaaagacatccaaggtctgccgtgcattaccgacgacgtacgtcctgtgatcgaagagatcatcgaagtaggcgagagcagccgtgttaaagaaatcctcaatgacgagcgctacaaggcctttaagcagttcaccagcgtgttcggtgtgggcgtcaagaccgcggaaaagtggtaccgtatgggcctccgtacgctggaagaagtaaaggccagtaagttcctgaagctgaacaagatgcagaaggcgggcttcctgtactacgaggatctggcgagcggtgttacgaaagaagaaaaagatgccgttctggatatcgtgaaggaaacggtgtggactgttgatccggatgcgctggtgaccatcgtgggcggtttccgccgtggcaaacctcagggccacgacgttgacctgctgatcacgattccgggccgtcctacggatccggagctgctccacaacgtggttgatctgctcaagaagcaaggtctgctgctgtacggggacatccgtgagcgtacgttcgtggaggggcaactgccaaatcctaaacctgaccagctggacaatcatcagaagtgcttcgccattctcaagctgtaccgcccgaaggtggataacagtgcggttgggacgtcgaagaaagtcgacatggctgaggttaaggattggaaagcggttcgtgtggatctggtggtcgctccagatgagcagtatgcctatgcgaaactcggttggacgggcagcggcatgtttcgtcgcgatactcgtcgctacgcggaggaagagcgcgacatgctgctcgacaaccatggtctctacgacctgaaaaagggcatttttctgagtgcggacagcgaagaagagattttcggtcatctggacctggattatctggagccgtgggaacgcaacgcg

SEQ ID NO: 6278 - protein, 394 aa, synthetic construct
  REGION 1..394: note = Variant of terminal deoxynucleotidyl transferase
MHHHHHHGGSGHPEGNTPEKEVPSVIARHVSPYACQRKTTLNNYNKKITDALEIMAENYKFKENLQARLEARRAASVLKSLPFEVTSMKDIQGLPCITDDVRPVIEEIIEVGESSRVKEILNDERYKAFKQFTSVFGVGVKTAEKWYRMGLRTLEEVKASKFLKLNKMQKAGFLYYEDLASGVTKEEKDAVLDIVKETVWTVDPDALVTIVGGFRRGKPQGHDVDLLITIPGRPTDPELLHNVVDLLKKQGLLLYGDIRERTFVEGQLPNPKPDQLDNHQKCFAILKLYRPKVDNSAVGTSKKVDMAEVKDWKAVRVDLVVAPDEQYAYAKLGWTGSGMFRRDTRRYAEEERDMLLDNHGLYDLKKGIFLSADSEEEIFGHLDLDYLEPWERNA

SEQ ID NO: 6279 - DNA, 1182 bp, synthetic construct
  misc_feature 1..1182: note = Variant of terminal deoxynucleotidyl transferase
  source 1..1182: mol_type = other DNA
atgcaccatcatcaccatcacgggggctccggccatccggaaggtaataccccggagaaggaggtgccgagcgttatcgcccgtcatgttagtccgtacgcgtgccagcgcaagaccacgctgaataactacaacaaaaagatcaccgacgcgctggagatcatggccgagaactacaagtttaaagagaacctgcaggcgcgcctggaggcccgtcgcgccgcgagtgtcctgaaaagcctgccgttcgaggttaccagcatgaaagacatccaaggtctgccgtgcattaccgacgacgtacgtcctgtgatcgaagagatcatcgaagtaggcgagagcagccgtgttaaagaaatcctcaatgacgagcgctacaaggcctttaagcagttcaccagcgtgttcggtgtgggcgtcaagaccgcggaaaagtggtaccgtatgggcctccgtacgctggaagaagtaaaggccagtaagttcctgaagctgaacaagatgcagaaggcgggcttcctgtactacgaggatctggcgagcggtgttacgaaagaagaaaaagatgccgttctggatatcgtgaaggaaacggtgtggactgttgatccggatgcgctggtgaccatcgtgggcggtttccgccgtggcaaacctcagggccacgacgttgacctgctgatcacgattccgggccgtcctacggatccggagctgctccacaacgtggttgatctgctcaagaagcaaggtctgctgctgtacggggacatccgtgagcgtacgttcgtggaggggcaactgccaaatcctaaacctgaccagctggacaatcatcagaagtgcttcgccattctcaagctgtaccgcccgaaggtggataacagtgcggttgggacgtcgaagaaagtcgacatggctgaggttaaggattggaaagcggttcgtgtggatctggtggtcgctccagatgagcagttcgcctatgcgaaactcggttggacgggcagcggcatgtttcgtcgcgatactcgtcgctacgcggaggaagagcgcgacatgctgctcgacaaccatggtctctacgacctgaaaaagggcatctttctgagtgcgcagagcgaagaagagattttcggtcatctggacctggattatctggagccgtgggaacgcaacgcg

SEQ ID NO: 6280 - protein, 394 aa, synthetic construct
  REGION 1..394: note = Variant of terminal deoxynucleotidyl transferase
MHHHHHHGGSGHPEGNTPEKEVPSVIARHVSPYACQRKTTLNNYNKKITDALEIMAENYKFKENLQARLEARRAASVLKSLPFEVTSMKDIQGLPCITDDVRPVIEEIIEVGESSRVKEILNDERYKAFKQFTSVFGVGVKTAEKWYRMGLRTLEEVKASKFLKLNKMQKAGFLYYEDLASGVTKEEKDAVLDIVKETVWTVDPDALVTIVGGFRRGKPQGHDVDLLITIPGRPTDPELLHNVVDLLKKQGLLLYGDIRERTFVEGQLPNPKPDQLDNHQKCFAILKLYRPKVDNSAVGTSKKVDMAEVKDWKAVRVDLVVAPDEQFAYAKLGWTGSGMFRRDTRRYAEEERDMLLDNHGLYDLKKGIFLSAQSEEEIFGHLDLDYLEPWERNA

SEQ ID NO: 6281 - DNA, 1182 bp, synthetic construct
  misc_feature 1..1182: note = Variant of terminal deoxynucleotidyl transferase
  source 1..1182: mol_type = other DNA
atgcaccatcatcaccatcacgggggctccggccatccggaaggtaataccccggagaaggaggtgccgagcgttatcgcccgtcatgttagtccgtacgcgtgccagcgcaagaccacgctgaataactacaacaaaaagatcaccgacgcgctggagatcatggccgagaactacaagtttaaagagaacctgcaggcgcgcctggaggcccgtcgcgccgcgagtgtcctgaaaagcctgccgttcgaggttaccagcatgaaagacatccaaggtctgccgtgcattaccgacgacgtacgtcctgtgatcgaagagatcatcgaagtaggcgagagcagccgtgttaaagaaatcctcaatgacgagcgctacaaggcctttaagcagttcaccagcgtgttcggtgtgggcgtcaagaccgcggaaaagtggtaccgtatgggcctccgtacgctggaagaagtaaaggccagtaagttcctgaagctgaacaagatgcagaaggcgggcttcctgtactacgaggatctggcgagcggtgttacgaaagaagaaaaagatgccgttctggatatcgtgaaggaaacggtgtggactgttgatccggatgcgctggtgaccatcgtgggcggtttccgccgtggcaaacctcagggccacgacgttgacctgctgatcacgattccgggccgtcctacggatccggagctgctccacaacgtggttgatctgctcaagaagcaaggtctgctgctgtacggggacatccgtgagcgtacgttcgtggaggggcaactgccaaatcctaaacctgaccagctggacaatcatcagaagtgcttcgccattctcaagctgtaccgtccgagggtggataacagtgcggttgggacgtcgaagaaagtcgacatggctgaggttaaggattggaaagcggttcgtgtggatctggtggtcgctccagatgagcagttcgcctatgcgaaactcggttggacgggcagcggcatgtttcgtcgcgatactcgtcgctacgcggaggaagagcgcgacatgctgctcgacaaccatggtctctacgacctgaaaaagggcatttttctgagtgcggacagcgaagaagagattttcggtcatctggacctggattatctggagccgtgggaacgcaacgcg

SEQ ID NO: 6282 - protein, 394 aa, synthetic construct
  REGION 1..394: note = Variant of terminal deoxynucleotidyl transferase
MHHHHHHGGSGHPEGNTPEKEVPSVIARHVSPYACQRKTTLNNYNKKITDALEIMAENYKFKENLQARLEARRAASVLKSLPFEVTSMKDIQGLPCITDDVRPVIEEIIEVGESSRVKEILNDERYKAFKQFTSVFGVGVKTAEKWYRMGLRTLEEVKASKFLKLNKMQKAGFLYYEDLASGVTKEEKDAVLDIVKETVWTVDPDALVTIVGGFRRGKPQGHDVDLLITIPGRPTDPELLHNVVDLLKKQGLLLYGDIRERTFVEGQLPNPKPDQLDNHQKCFAILKLYRPRVDNSAVGTSKKVDMAEVKDWKAVRVDLVVAPDEQFAYAKLGWTGSGMFRRDTRRYAEEERDMLLDNHGLYDLKKGIFLSADSEEEIFGHLDLDYLEPWERNA

SEQ ID NO: 6283 - DNA, 1182 bp, synthetic construct
  misc_feature 1..1182: note = Variant of terminal deoxynucleotidyl transferase
  source 1..1182: mol_type = other DNA
atgcaccatcatcaccatcacgggggctccggccatccggaaggtaataccccggagaaggaggtgccgagcgttatcgcccgtcatgttagtccgtacgcgtgccagcgcaagaccacgctgaataactacaacaaaaagatcaccgacgcgctggaaatcatgggggagaactacaagtttaaagagaacctgcaggcgcgcctggaggcccgtcgcgccgcgagtgtcctgaaaagcctgccgttcgaggttaccagcatgaaagacatccaaggtctgccgtgcattaccgacgacgtacgtcctgtgatcgaagagatcatcgaagtaggcgagagcagccgtgttaaagaaatcctcaatgacgagcgctacaaggcctttaagcagttcaccagcgtgttcggtgtgggcgtcaagaccgcggaaaagtggtaccgtatgggcctccgtacgctggaagaagtaaaggccagtaagttcctgaagctgaacaagatgcagaaggcgggcttcctgtactacgaggatctggcgagcggtgttacgaaagaagaaaaagatgccgttctggatatcgtgaaggaaacggtgtggactgttgatccggatgcgctggtgaccatcgtgggcggtttccgccgtggcaaacctcagggccacgacgttgacctgctgatcacgattccgggccgtcctacggatccggagctgctccacaacgtggttgatctgctcaagaagcaaggtctgctgctgtacggggacatccgtgagcgtacgttcgtggaggggcaactgccaaatcctaaacctgaccagctggacaatcatcagaagtgcttcgccattctcaagctgtaccgcccgaaggtggataacagtgcggttgggacgtcgaagaaagtcgacatggctgaggttaaggattggaaagcggttcgtgtggatctggtggtcgctccagatgagcagttcgcctatgcgaaactcggttggacgggcagcggcatgtttcgtcgcgatactcgtcgctacgcggaggaagagcgcgacatgctgctcgacaaccatggtctctacgacctgaaaaagggcatttttctgagtgcggacagcgaagaagagattttcggtcatctggacctggattatctggagccgtgggaacgcaacgcg

SEQ ID NO: 6284 - protein, 394 aa, synthetic construct
  REGION 1..394: note = Variant of terminal deoxynucleotidyl transferase
MHHHHHHGGSGHPEGNTPEKEVPSVIARHVSPYACQRKTTLNNYNKKITDALEIMGENYKFKENLQARLEARRAASVLKSLPFEVTSMKDIQGLPCITDDVRPVIEEIIEVGESSRVKEILNDERYKAFKQFTSVFGVGVKTAEKWYRMGLRTLEEVKASKFLKLNKMQKAGFLYYEDLASGVTKEEKDAVLDIVKETVWTVDPDALVTIVGGFRRGKPQGHDVDLLITIPGRPTDPELLHNVVDLLKKQGLLLYGDIRERTFVEGQLPNPKPDQLDNHQKCFAILKLYRPKVDNSAVGTSKKVDMAEVKDWKAVRVDLVVAPDEQFAYAKLGWTGSGMFRRDTRRYAEEERDMLLDNHGLYDLKKGIFLSADSEEEIFGHLDLDYLEPWERNA

SEQ ID NO: 6285 - DNA, 1182 bp, synthetic construct
  misc_feature 1..1182: note = Variant of terminal deoxynucleotidyl transferase
  source 1..1182: mol_type = other DNA
atgcaccatcatcaccatcacgggggctccggccatccggaaggtaataccccggagaaggaggtgccgagcgttatcgcccgtcatgttagtccgtacgcgtgccagcgcaagaccacgctgaataactacaacaaaaagatcaccgacgcgctggagatcatggccgagaactacaagtttaaagagaacctgcaggcgcgcctggaggcccgtcgcgccgcgagtgtcctgaaaagcctgccgttcgaggttaccagcatgaaagacatccaaggtctgccgtgcattaccgacgacgtacgtcctgtgatcgaagagatcatcgaagtaggcgagagcagccgtgttaaagaaatcctcaatgacgagcgctacaaggcctttaagcagttcaccagcgtgttcggtgtgggcgtcaagaccgcggaaaagtggtaccgtatgggcctccgtacgctggaagaagtaaaggccagtaagttcctgaagctgaacaagatgcagaaggcgggcttcctgtactacgaggatctggcgagcggtgttacgaaagaagaaaaagatgccgttctggatatcgtgaaggaaacggtgtggactgttgatccggatgcgctggtgaccatcgtgggcggtttccgccgtggcaaaattcagggccacgacgttgacctgctgatcacgattccgggccgtcctacggatccggagctgctccacaacgtggttgatctgctcaagaagcaaggtctgctgctgtacggggacatccgtgagcgtacgttcgtggaggggcaactgccaaatcctaaacctgaccagctggacaatcatcagaagtgcttcgccattctcaagctgtaccgcccgaaggtggataacagtgcggttgggacgtcgaagaaagtcgacatggctgaggttaaggattggaaagcggttcgtgtggatctggtggtcgctccagatgagcagttcgcctatgcgaaactcggttggacgggcagcggcatgtttcgtcgcgatactcgtcgctacgcggaggaagagcgcgacatgctgctcgacaaccatggtctctacgacctgaaaaagggcatttttctgagtgcggacagcgaagaagagattttcggtcatctggacctggattatctggagccgtgggaacgcaacgcg

SEQ ID NO: 6286 - protein, 394 aa, synthetic construct
  REGION 1..394: note = Variant of terminal deoxynucleotidyl transferase
MHHHHHHGGSGHPEGNTPEKEVPSVIARHVSPYACQRKTTLNNYNKKITDALEIMAENYKFKENLQARLEARRAASVLKSLPFEVTSMKDIQGLPCITDDVRPVIEEIIEVGESSRVKEILNDERYKAFKQFTSVFGVGVKTAEKWYRMGLRTLEEVKASKFLKLNKMQKAGFLYYEDLASGVTKEEKDAVLDIVKETVWTVDPDALVTIVGGFRRGKIQGHDVDLLITIPGRPTDPELLHNVVDLLKKQGLLLYGDIRERTFVEGQLPNPKPDQLDNHQKCFAILKLYRPKVDNSAVGTSKKVDMAEVKDWKAVRVDLVVAPDEQFAYAKLGWTGSGMFRRDTRRYAEEERDMLLDNHGLYDLKKGIFLSADSEEEIFGHLDLDYLEPWERNA

SEQ ID NO: 6287 - DNA, 1182 bp, synthetic construct
  misc_feature 1..1182: note = Variant of terminal deoxynucleotidyl transferase
  source 1..1182: mol_type = other DNA
atgcaccatcatcaccatcacgggggctccggccatccggaaggtaataccccggagaaggaggtgccgagcgttatcgcccgtcatgttagtccgtacgcgtgccagcgcaagaccacgctgaataactacaacaaaaagatcaccgacgcgctggagatcatggccgagaactacaagtttaaagagaacctgcaggcgcgcctggaggcccgtcgcgccgcgagtgtcctgaaaagcctgccgttcgaggttaccagcatgaaagacatccaaggtctgccgtgcattaccgacgacgtacgtcctgtgatcgaagagatcatcgaagtaggcgagagcagccgtgttaaagaaatcctcaatgacgagcgctacaaggcctttaagcagttcaccagcgtgttcggtgtgggcgtcaagaccgcggaaaagtggtaccgtatgggcctccgtacgctggaagaagtaaaggccagtaagttcctgaagctgaacaagatgcagaaggcgggcttcctgtactatgaggatctggcgagcggtgttacgaaagaagaaaaagatgccgttctggatatcgtgaaggaaacggtgtggactgttgatccggatgcgctggtgaccatcgtgggcggtttccgccgtggcaaagttcagggccacgacgttgacctgctgatcacgattccgggccgtcctacggatccggagctgctccacaacgtggttgatctgctcaagaagcaaggtctgctgctgtacggggacatccgtgagcgtacgttcgtggaggggcaactgccaaatcctaaacctgaccagctggacaatcatcagaagtgcttcgccattctcaagctgtaccgcccgaaggtggataacagtgcggttgggacgtcgaagaaagtcgacatggctgaggttaaggattggaaagcggttcgtgtggatctggtggtcgctccagatgagcagttcgcctatgcgaaactcggttggacgggcagcggcatgtttcgtcgcgatactcgtcgctacgcggaggaagagcgcgacatgctgctcgacaaccatggtctctacgacctgaaaaagggcatttttctgagtgcggacagcgaagaagagattttcggtcatctggacctggattatctggagccgtgggaacgcaacgcg

SEQ ID NO: 6288 - protein, 394 aa, synthetic construct
  REGION 1..394: note = Variant of terminal deoxynucleotidyl transferase
MHHHHHHGGSGHPEGNTPEKEVPSVIARHVSPYACQRKTTLNNYNKKITDALEIMAENYKFKENLQARLEARRAASVLKSLPFEVTSMKDIQGLPCITDDVRPVIEEIIEVGESSRVKEILNDERYKAFKQFTSVFGVGVKTAEKWYRMGLRTLEEVKASKFLKLNKMQKAGFLYYEDLASGVTKEEKDAVLDIVKETVWTVDPDALVTIVGGFRRGKVQGHDVDLLITIPGRPTDPELLHNVVDLLKKQGLLLYGDIRERTFVEGQLPNPKPDQLDNHQKCFAILKLYRPKVDNSAVGTSKKVDMAEVKDWKAVRVDLVVAPDEQFAYAKLGWTGSGMFRRDTRRYAEEERDMLLDNHGLYDLKKGIFLSADSEEEIFGHLDLDYLEPWERNA

SEQ ID NO: 6289 - DNA, 1182 bp, synthetic construct
  misc_feature 1..1182: note = Variant of terminal deoxynucleotidyl transferase
  source 1..1182: mol_type = other DNA
atgcaccatcatcaccatcacgggggctccggccatccggaaggtaataccccggagaaggaggtgccgagcgttatcgcccgtcatgttagtccgtacgcgtgccagcgcaagaccacgctgaataactacaacaaaaagatcaccgacgcgctggagatcatggccgagaactacaagtttaaagagaacctgcaggcgcgcctggaggcccgtcgcgccgcgagtgtcctgaaaagcctgccgttcgaggttaccagcatgaaagacatccaaggtctgccgtgcattaccgacgacgtacgtcctgtgatcgaagagatcatcgaagtaggcgagagcagccgtgttaaagaaatcctcaatgacgagcgctacaaggcctttaagcagttcaccagcgtgttcggtgtgggcgtcaagaccgcggaaaagtggtaccgtatgggcctccgtacgctggaagaagtaaaggagagtaagttcctgaagctgaacaagatgcagaaggcgggcttcctgtactacgaggatctggcgagcggtgttacgaaagaagaaaaagatgccgttctggatatcgtgaaggaaacggtgtggactgttgatccggatgcgctggtgaccatcgtgggcggtttccgccgtggcaaacctcagggccacgacgttgacctgctgatcacgattccgggccgtcctacggatccggagctgctccacaacgtggttgatctgctcaagaagcaaggtctgctgctgtacggggacatccgtgagcgtacgttcgtggaggggcaactgccaaatcctaaacctgaccagctggacaatcatcagaagtgcttcgccattctcaagctgtaccgcccgaaggtggataacagtgcggttgggacgtcgaagaaagtcgacatggctgaggttaaggattggaaagcggttcgtgtggatctggtggtcgctccagatgagcagttcgcctatgcgaaactcggttggacgggcagcggcatgtttcgtcgcgatactcgtcgctacgcggaggaagagcgcgacatgctgctcgacaaccatggtctctacgacctgaaaaagggcatttttctgagtgcggacagcgaagaagagattttcggtcatctggacctggattatctggagccgtgggaacgcaacgcg

SEQ ID NO: 6290 - protein, 394 aa, synthetic construct
  REGION 1..394: note = Variant of terminal deoxynucleotidyl transferase
MHHHHHHGGSGHPEGNTPEKEVPSVIARHVSPYACQRKTTLNNYNKKITDALEIMAENYKFKENLQARLEARRAASVLKSLPFEVTSMKDIQGLPCITDDVRPVIEEIIEVGESSRVKEILNDERYKAFKQFTSVFGVGVKTAEKWYRMGLRTLEEVKESKFLKLNKMQKAGFLYYEDLASGVTKEEKDAVLDIVKETVWTVDPDALVTIVGGFRRGKPQGHDVDLLITIPGRPTDPELLHNVVDLLKKQGLLLYGDIRERTFVEGQLPNPKPDQLDNHQKCFAILKLYRPKVDNSAVGTSKKVDMAEVKDWKAVRVDLVVAPDEQFAYAKLGWTGSGMFRRDTRRYAEEERDMLLDNHGLYDLKKGIFLSADSEEEIFGHLDLDYLEPWERNA

SEQ ID NO: 6291 - DNA, 1182 bp, synthetic construct
  misc_feature 1..1182: note = Variant of terminal deoxynucleotidyl transferase
  source 1..1182: mol_type = other DNA
atgcaccatcatcaccatcacgggggctccggccatccggaaggtaataccccggagaaggaggtgccgagcgttatcgcccgtcatgttagtccgtacgcgtgccagcgcaagaccacgctgaataactacaacaaaaagatcaccgacgcgctggagatcatggccgagaactacaagtttaaagagaacctgttggcgcgcctggaggcccgtcgcgccgcgagtgtcctgaaaagcctgccgttcgaggttaccagcatgaaagacatccaaggtctgccgtgcattaccgacgacgtacgtcctgtgatcgaagagatcatcgaagtaggcgagagcagccgtgttaaagaaatcctcaatgacgagcgctacaaggcctttaagcagttcaccagcgtgttcggtgtgggcgtcaagaccgcggaaaagtggtaccgtatgggcctccgtacgctggaagaagtaaaggccagtaagttcctgaagctgaacaagatgcagaaggcgggcttcctgtactacgaggatctggcgagcggtgttacgaaagaagaaaaagatgccgttctggatatcgtgaaggaaacggtgtggactgttgatccggatgcgctggtgaccatcgtgggcggtttccgccgtggcaaacctcagggccacgacgttgacctgctgatcacgattccgggccgtcctacggatccggagctgctccacaacgtggttgatctgctcaagaagcaaggtctgctgctgtacggggacatccgtgagcgtacgttcgtggaggggcaactgccaaatcctaaacctgaccagctggacaatcatcagaagtgcttcgccattctcaagctgtaccgcccgaaggtggataacagtgcggttgggacgtcgaagaaagtcgacatggctgaggttaaggattggaaagcggttcgtgtggatctggtggtcgctccagatgagcagttcgcctatgcgaaactcggttggacgggcagcggcatgtttcgtcgcgatactcgtcgctacgcggaggaagagcgcgacatgctgctcgacaaccatggtctctacgacctgaaaaagggcatttttctgagtgcggacagcgaagaagagattttcggtcatctggacctggattatctggagccgtgggaacgcaacgcg

SEQ ID NO: 6292 - protein, 394 aa, synthetic construct
  REGION 1..394: note = Variant of terminal deoxynucleotidyl transferase
MHHHHHHGGSGHPEGNTPEKEVPSVIARHVSPYACQRKTTLNNYNKKITDALEIMAENYKFKENLLARLEARRAASVLKSLPFEVTSMKDIQGLPCITDDVRPVIEEIIEVGESSRVKEILNDERYKAFKQFTSVFGVGVKTAEKWYRMGLRTLEEVKASKFLKLNKMQKAGFLYYEDLASGVTKEEKDAVLDIVKETVWTVDPDALVTIVGGFRRGKPQGHDVDLLITIPGRPTDPELLHNVVDLLKKQGLLLYGDIRERTFVEGQLPNPKPDQLDNHQKCFAILKLYRPKVDNSAVGTSKKVDMAEVKDWKAVRVDLVVAPDEQFAYAKLGWTGSGMFRRDTRRYAEEERDMLLDNHGLYDLKKGIFLSADSEEEIFGHLDLDYLEPWERNA

SEQ ID NO: 6293 - DNA, 1182 bp, synthetic construct
  misc_feature 1..1182: note = Variant of terminal deoxynucleotidyl transferase
  source 1..1182: mol_type = other DNA
atgcaccatcatcaccatcacgggggctccggccatccggaaggtaataccccggagaaggaggtgccgagcgttatcgcccgtcatgttagtccgtacgcgtgccagcgcaagaccacgctgaataactacaacaaaaagatcaccgacgcgctggagatcatggccgagaactacaagtttaaagagaacctgcaggcgcgcctggaggcccgtcgcgccgcgagtgtcctgaaaagcctgccgttcgaggttaccagcatgaaagacatccaaggtctgccgtgcattaccgacgacgtacgtcctgtgatcgaagagatcatcgaagtaggcgagagcagccgtgttaaagaaatcctcaatgacgagcgctacaaggcctttaagcagttcaccagcgtgttcggtgtgggcgtcaagaccgcggaaaagtggtaccgtatgggcctccgtacgctggaagaagtaaaggccagtaagttcctgaagctgaacaagatgcagaaggcgggcttcctgtactacgaggatctggcgagcggtgttacgaaagaagaaaaagatgccgttctggatatcgtgaaggaaacggtgtggactgttgatccggatgcgctggtgaccatcgtgggcggtttccgccgtggcaaacctcagggccacgacgttgacctgctgatcacgattccgggccgtcctacggatccggagctgctccacaacgtggttgatctgctcaagaagcaaggtctgctgctgtacggggacatccgtgagcgtacgttcgtggaggggcaactgccaaatcctacgcctgaccagctggacaatcatcagaagtgcttcgccattctcaagctgtaccgcccgaaggtggataacagtgcggttgggacgtcgaagaaagtcgacatggctgaggttaaggattggaaagcggttcgtgtggatctggtggtcgctccagatgagcagttcgcctatgcgaaactcggttggacgggcagcggcatgtttcgtcgcgatactcgtcgctacgcggaggaagagcgcgacatgctgctcgacaaccatggtctctacgacctgaaaaagggcatttttctgagtgcggacagcgaagaagagattttcggtcatctggacctggattatctggagccgtgggaacgcaacgcg

SEQ ID NO: 6294 - protein, 394 aa, synthetic construct
  REGION 1..394: note = Variant of terminal deoxynucleotidyl transferase
MHHHHHHGGSGHPEGNTPEKEVPSVIARHVSPYACQRKTTLNNYNKKITDALEIMAENYKFKENLQARLEARRAASVLKSLPFEVTSMKDIQGLPCITDDVRPVIEEIIEVGESSRVKEILNDERYKAFKQFTSVFGVGVKTAEKWYRMGLRTLEEVKASKFLKLNKMQKAGFLYYEDLASGVTKEEKDAVLDIVKETVWTVDPDALVTIVGGFRRGKPQGHDVDLLITIPGRPTDPELLHNVVDLLKKQGLLLYGDIRERTFVEGQLPNPTPDQLDNHQKCFAILKLYRPKVDNSAVGTSKKVDMAEVKDWKAVRVDLVVAPDEQFAYAKLGWTGSGMFRRDTRRYAEEERDMLLDNHGLYDLKKGIFLSADSEEEIFGHLDLDYLEPWERNA

SEQ ID NO: 6295 - DNA, 1182 bp, synthetic construct
  misc_feature 1..1182: note = Variant of terminal deoxynucleotidyl transferase
  source 1..1182: mol_type = other DNA
atgcaccatcatcaccatcacgggggctccggccatccggaaggtaataccccggagaaggaggtgccgagcgttatcgcccgtcatgttagtccgtacgcgtgccagcgcaagaccacgctgaataactacaacaaaaagatcaccgacgcgctggagatcatggccgagaactacaagtttaaagagaacctgcaggcgcgcctggaggcccgtcgcgccgcgagtgtcctgaaaagcctgccgttcgaggttaccagcatgaaagacatccaaggtctgccgtgcattaccgacgacgtacgtcctgtgatcgaagagatcatcgaagtaggcgagagcagccgtgttaaagaaatcctcaatgacgagcgctacaaggcctttaagcagttcaccagcgtgttcggtgtgggcgtcaagaccgcggaaaagtggtaccgtatgggctatcgtacgctggaagaagtaaaggccagtaagttcctgaagctgaacaagatgcagaaggcgggcttcctgtactacgaggatctggcgagcggtgttacgaaagaagaaaaagatgccgttctggatatcgtgaaggaaacggtgtggactgttgatccggatgcgctggtgaccatcgtgggcggtttccgccgtggcaaacctcagggccacgacgttgacctgctgatcacgattccgggccgtcctacggatccggagctgctccacaacgtggttgatctgctcaagaagcaaggtctgctgctgtacggggacatccgtgagcgtacgttcgtggaggggcaactgccaaatcctaaacctgaccagctggacaatcatcagaagtgcttcgccattctcaagctgtaccgcccgaaggtggataacagtgcggttgggacgtcgaagaaagtcgacatggctgaggttaaggattggaaagcggttcgtgtggatctggtggtcgctccagatgagcagttcgcctatgcgaaactcggttggacgggcagcggcatgtttcgtcgcgatactcgtcgctacgcggaggaagagcgcgacatgctgctcgacaaccatggtctctacgacctgaaaaagggcatttttctgagtgcggacagcgaagaagagattttcggtcatctggacctggattatctggagccgtgggaacgcaacgcg

SEQ ID NO: 6296 - protein, 394 aa, synthetic construct
  REGION 1..394: note = Variant of terminal deoxynucleotidyl transferase
MHHHHHHGGSGHPEGNTPEKEVPSVIARHVSPYACQRKTTLNNYNKKITDALEIMAENYKFKENLQARLEARRAASVLKSLPFEVTSMKDIQGLPCITDDVRPVIEEIIEVGESSRVKEILNDERYKAFKQFTSVFGVGVKTAEKWYRMGYRTLEEVKASKFLKLNKMQKAGFLYYEDLASGVTKEEKDAVLDIVKETVWTVDPDALVTIVGGFRRGKPQGHDVDLLITIPGRPTDPELLHNVVDLLKKQGLLLYGDIRERTFVEGQLPNPKPDQLDNHQKCFAILKLYRPKVDNSAVGTSKKVDMAEVKDWKAVRVDLVVAPDEQFAYAKLGWTGSGMFRRDTRRYAEEERDMLLDNHGLYDLKKGIFLSADSEEEIFGHLDLDYLEPWERNA

SEQ ID NO: 6297 - DNA, 1182 bp, synthetic construct
  misc_feature 1..1182: note = Variant of terminal deoxynucleotidyl transferase
  source 1..1182: mol_type = other DNA
atgcaccatcatcaccatcacgggggctccggccatccggaaggtaataccccggagaaggaggtgccgagcgttatcgcccgtcatgttagtccgtacgcgtgccagcgcaagaccacgctgaataactacaacaaaaagatcaccgacgcgctggagatcatggccgagaactacaagtttaaagagaacctgcaggcgcgcctggaggcccgtcgcgccgcgagtgtcctgaaaagcctgccgttcgaggttaccagcatgaaagacatccaaggtctgccgtgcattaccgacgacgtacgtcctgtgatcgaagagatcatcgaagtaggcgagagcagccgtgttaaagaaatcctcaatgacgagcgctacaaggcctttaagcagttcaccagcgtgttcggtgtgggcgtcaagaccgcggaaaagtggtaccgtatgggcctccgtacgctggaagaagtaaaggccagtaagttcctgaagctgaacaagatgcagaaggcgggcttcctgtactacgaggatctggcgagcggtgttacgaaagaagaaaaagatgccgttctggatatcgtgaaggaaacggtgtggactgttgatccggatgcgctggtgaccatcgtgggcggtttccgccgtggcaaacctcagggccacgacgttgacctgctgatcacgattccgggccgtcctacggatccggagctgctccacaacgtggttgatctgctcaagaagcaaggtctgctgctgtacggggacatccgtgagcgtacgttcgtggaggggcaactgccaaatcctaaacctgaccagctggacaatcatcagaagtgcttcgccattctcaagctgtaccgcccgaaggtggataacagtgcggttgggacgtcgaagaaagtcgacatggctgaggttaaggattggaaagcggttcgtgtggatctggtggtcgctccagatgagcagttcgcctatgcgaaactcggttggacgggcagcggcatgtttcgtcgcgatactcgtcgctacgcggaggaagagcgcgacatgctgctcgacaaccatggtctctacgacctgaaaaagggcatctttctgagtgcgaagagcgaagaagagattttcggtcatctggacctggattatctggagccgtgggaacgcaacgcg

SEQ ID NO: 6298 - protein, 394 aa, synthetic construct
  REGION 1..394: note = Variant of terminal deoxynucleotidyl transferase
MHHHHHHGGSGHPEGNTPEKEVPSVIARHVSPYACQRKTTLNNYNKKITDALEIMAENYKFKENLQARLEARRAASVLKSLPFEVTSMKDIQGLPCITDDVRPVIEEIIEVGESSRVKEILNDERYKAFKQFTSVFGVGVKTAEKWYRMGLRTLEEVKASKFLKLNKMQKAGFLYYEDLASGVTKEEKDAVLDIVKETVWTVDPDALVTIVGGFRRGKPQGHDVDLLITIPGRPTDPELLHNVVDLLKKQGLLLYGDIRERTFVEGQLPNPKPDQLDNHQKCFAILKLYRPKVDNSAVGTSKKVDMAEVKDWKAVRVDLVVAPDEQFAYAKLGWTGSGMFRRDTRRYAEEERDMLLDNHGLYDLKKGIFLSAKSEEEIFGHLDLDYLEPWERNA

SEQ ID NO: 6299 - DNA, 1182 bp, synthetic construct
  misc_feature 1..1182: note = Variant of terminal deoxynucleotidyl transferase
  source 1..1182: mol_type = other DNA
atgcaccatcatcaccatcacgggggctccggccatccggaaggtaataccccggagaaggaggtgccgagcgttatcgcccgtcatgttagtccgtacgcgtgccagcgcaagaccacgctgaataactacaacaaaaagatcaccgacgcgctggagatcatggccgagaactacaagtttaaagagaacctgcaggcgcgcctggaggcccgtcgcgccgcgagtgtcctgaaaagcctgccgttcgaggttaccagcatgaaagacatccaaggtctgccgtgcattaccgacgacgtacgtcctgtgatcgaagagatcatcgaagtaggcgagagcagccgtgttaaagaaatcctcaatgacgagcgctacaaggcctttaagcagttcaccagcgtgttcggtgtgggcgtcaagaccgcggaaaagtggtaccgtatgggcctccgtacgctggaagaagtaaaggccagtaagttcctgaagctgaacaagatgcagaaggcgggcttcctgtactacgaggatctggcgagcggtgttacgaaagaagaaaaagatgccgttctggatatcgtgaaggaaacggtgtggactgttgatccggatgcgctggtgaccatcgtgggcggtttccgccgtggcaaacctcagggccacgacgttgacctgctgatcacgattccgggccgtcctacggatccggagctgctccacaacgtggttgatctgctcaagaagcaaggtctgctgctgtacggggacatccgtgagcgtacgttcgtggaggggcaactgccaaatcctaaacctgaccagctggacaatcatcagaagtgcttcgccattctcaagctgtaccgcccgaaggtggataacagtgcggttgggacgtcgaagaaagtcgacatggctgaggttaaggattggaaagcggttcgtgtggatctggtggtcgctccagatgagcagttcgcctatgcgaaactcggttggacgggcagcggcatgtttcgtcgcgatactcgtcgctacgcggaggaagagcgcgacatgctgctcgacaaccatggtctctacgaccgtaaaaagggcatctttctgagtgcggacagcgaagaagagattttcggtcatctggacctggattatctggagccgtgggaacgcaacgcg

SEQ ID NO: 6300 - protein, 394 aa, synthetic construct
  REGION 1..394: note = Variant of terminal deoxynucleotidyl transferase
MHHHHHHGGSGHPEGNTPEKEVPSVIARHVSPYACQRKTTLNNYNKKITDALEIMAENYKFKENLQARLEARRAASVLKSLPFEVTSMKDIQGLPCITDDVRPVIEEIIEVGESSRVKEILNDERYKAFKQFTSVFGVGVKTAEKWYRMGLRTLEEVKASKFLKLNKMQKAGFLYYEDLASGVTKEEKDAVLDIVKETVWTVDPDALVTIVGGFRRGKPQGHDVDLLITIPGRPTDPELLHNVVDLLKKQGLLLYGDIRERTFVEGQLPNPKPDQLDNHQKCFAILKLYRPKVDNSAVGTSKKVDMAEVKDWKAVRVDLVVAPDEQFAYAKLGWTGSGMFRRDTRRYAEEERDMLLDNHGLYDRKKGIFLSADSEEEIFGHLDLDYLEPWERNA

SEQ ID NO: 6301 - DNA, 1182 bp, synthetic construct
  misc_feature 1..1182: note = Variant of terminal deoxynucleotidyl transferase
  source 1..1182: mol_type = other DNA
atgcaccatcatcaccatcacgggggctccggccatccggaaggtaataccccggagaaggaggtgccgagcgttatcgcccgtcatgttagtccgtacgcgtgccagcgcaagaccacgctgaataactacaacaaaaagatcaccgacgcgctggagatcatggccgagaactacaagtttaaagagaacctgcaggcgcgcctggaggcccgtcgcgccgcgagtgtcctgaaaagcctgccgttcgaggttaccagcatgaaagacatccaaggtctgccgtgcattaccgacgacgtacgtcctgtgatcgaagagatcatcgaagtaggcgagagcagccgtgttaaagaaatcctcaatgacgagcgctacaaggcctttaagcagttcaccagcgtgttcggtgtgggcgtcaagaccgcggaaaagtggtaccgtatgggcctccgtacgctggaagaagtaaaggccagtaagttcctgaagctgaacaagatgcagaaggcgggcttcctgtactacgaggatctggcgagcggtgttacgaaagaagaaaaagatgccgttctggatatcgtgaaggaaacggtgtggactgttgatccggatgcgctggtgaccatcgtgggcggtttccgccgtggcaaatcgcagggccacgacgttgacctgctgatcacgattccgggccgtcctacggatccggagctgctccacaacgtggttgatctgctcaagaagcaaggtctgctgctgtacggggacatccgtgagcgtacgttcgtggaggggcaactgccaaatcctaaacctgaccagctggacaatcatcagaagtgcttcgccattctcaagctgtaccgcccgaaggtggataacagtgcggttgggacgtcgaagaaagtcgacatggctgaggttaaggattggaaagcggttcgtgtggatctggtggtcgctccagatgagcagttcgcctatgcgaaactcggttggacgggcagcggcatgtttcgtcgcgatactcgtcgctacgcggaggaagagcgcgacatgctgctcgacaaccatggtctctacgacctgaaaaagggcatttttctgagtgcggacagcgaagaagagattttcggtcatctggacctggattatctggagccgtgggaacgcaacgcg

SEQ ID NO: 6302 - protein, 394 aa, synthetic construct
  REGION 1..394: note = Variant of terminal deoxynucleotidyl transferase
MHHHHHHGGSGHPEGNTPEKEVPSVIARHVSPYACQRKTTLNNYNKKITDALEIMAENYKFKENLQARLEARRAASVLKSLPFEVTSMKDIQGLPCITDDVRPVIEEIIEVGESSRVKEILNDERYKAFKQFTSVFGVGVKTAEKWYRMGLRTLEEVKASKFLKLNKMQKAGFLYYEDLASGVTKEEKDAVLDIVKETVWTVDPDALVTIVGGFRRGKSQGHDVDLLITIPGRPTDPELLHNVVDLLKKQGLLLYGDIRERTFVEGQLPNPKPDQLDNHQKCFAILKLYRPKVDNSAVGTSKKVDMAEVKDWKAVRVDLVVAPDEQFAYAKLGWTGSGMFRRDTRRYAEEERDMLLDNHGLYDLKKGIFLSADSEEEIFGHLDLDYLEPWERNA

SEQ ID NO: 6303 - DNA, 1182 bp, synthetic construct
  misc_feature 1..1182: note = Variant of terminal deoxynucleotidyl transferase
  source 1..1182: mol_type = other DNA
atgcaccatcatcaccatcacgggggctccggccatccggaaggtaataccccggagaaggaggtgccgagcgttatcgcccgtcatgttagtccgtacgcgtgccagcgcaagaccacgctgaataactacaacaaaaagatcaccgacgcgctggagatcatggccgagaactacaagtttaaagagaacctgcaggcgcgcctggaggcccgtcgcgccgcgagtgtcctgaaaagcctgccgttcgaggttaccagcatgaaagacatccaaggtctgccgtgcattaccgacgacgtacgtcctgtgatcgaagagatcatcgaagtaggcgagagcagccgtgttaaagaaatcctcaatgacgagcgctacaaggcctttaagcagttcaccagcgtgttcggtgtgggcgtcaagaccgcggaaaagtggtaccgtatgggcctccgtacgctggaagaagtaaaggccagtaagttcctgaagctgaacaagatgcagaaggcgggcttcctgtactacgaggatctggcgagcggtgttacgaaagaagaaaaagatgccgttctggatatcgtgaaggaaacggtgtggactgttgatccggatgcgctggtgaccatcgtgggcggtttccgccgtggcaaacctcagggccacgacgttgacctgctgatcacgattccgggccgtcctacggatccggagctgctccacaacgtggttgatctgctcaagaagcaaggtctgctgctgtacggggacatccgtgagcgtacgttcgtggaggggcaactgccaaatcctaaacctgaccagctggacaatcatcagaagtgcttcgccattctcaagctgtaccgcccgaaggtggataacagtgcggttgggacgtcgaagaaagtcgacatggctgaggttaaggattggaaagcggttcgtgtggatctggtggtcgctccagatgagcagttcgcctatgcgaaactcggttggacgggcagcggcatgtttcgtcgcgatactcgtcgctacgcggaggaagagcgcgacatgctgctcgacaaccatggtctctacgacctgaaaaagggcatctttctgtttgcggacagcgaagaagagattttcggtcatctggacctggattatctggagccgtgggaacgcaacgcg

SEQ ID NO: 6304 - protein, 394 aa, synthetic construct
  REGION 1..394: note = Variant of terminal deoxynucleotidyl transferase
MHHHHHHGGSGHPEGNTPEKEVPSVIARHVSPYACQRKTTLNNYNKKITDALEIMAENYKFKENLQARLEARRAASVLKSLPFEVTSMKDIQGLPCITDDVRPVIEEIIEVGESSRVKEILNDERYKAFKQFTSVFGVGVKTAEKWYRMGLRTLEEVKASKFLKLNKMQKAGFLYYEDLASGVTKEEKDAVLDIVKETVWTVDPDALVTIVGGFRRGKPQGHDVDLLITIPGRPTDPELLHNVVDLLKKQGLLLYGDIRERTFVEGQLPNPKPDQLDNHQKCFAILKLYRPKVDNSAVGTSKKVDMAEVKDWKAVRVDLVVAPDEQFAYAKLGWTGSGMFRRDTRRYAEEERDMLLDNHGLYDLKKGIFLFADSEEEIFGHLDLDYLEPWERNA

SEQ ID NO: 6305 - DNA, 1182 bp, synthetic construct
  misc_feature 1..1182: note = Variant of terminal deoxynucleotidyl transferase
  source 1..1182: mol_type = other DNA
atgcaccatcatcaccatcacgggggctccggccatccggaaggtaataccccggagaaggaggtgccgagcgttatcgcccgtcatgttagtccgtacgcgtgccagcgcaagaccacgctgaataactacaacaaaaagatcaccgacgcgctggagatcatggccgagaactacaagtttaaagagaacctgcaggcgcgcctggaggcccgtcgcgccgcgagtgtcctgaaaagcctgccgttcgaggttaccagcatgaaagacatccaaggtctgccgtgcattaccgacgacgtacgtcctgtgatcgaagagatcatcgaagtaggcgagagcagccgtgttaaagaaatcctcaatgacgagcgctacaaggcctttaagcagttcaccagcgtgttcggtgtgggcgtcaagaccgcggaaaagtggtaccgtatgggcctccgtacgctggaagaagtaaaggccagtaagttcctgaagctgaacaagatgcagaaggcgggcttcctgtactacgaggatctggcgagcggtgttacgaaagaagaaaaagatgccgttctggatatcgtgaaggaaacggtgtggactgttgatccggatgcgctggtgaccatcgtgggcggtttccgccgtggcaaacctcagggccacgacgttgacctgctgatcacgattccgggccgtcctacggatccggagctgctccacaacgtggttgatctgctcaagaagcaaggtctgctgctgtacggggacatccgtgagcgtacgttcgtggaggggcaactgccaaatcctaaacctgaccagctggacaatcatcagaagtgcttcgccattctcaagctgtaccgcccgaaggtggataacagtgcggttgggacgtcgaagaaagtcgacatggctgaggttaaggattggaaagcggttcgtgtggatctggtggtcgctccagatgagcaggcggcctatgcgaaactcggttggacgggcagcggcatgtttcgtcgcgatactcgtcgctacgcggaggaagagcgcgacatgctgctcgacaaccatggtctctacgacctgaaaaagggcatttttctgagtgcggacagcgaagaagagattttcggtcatctggacctggattatctggagccgtgggaacgcaacgcg

SEQ ID NO: 6306 - protein, 394 aa, synthetic construct
  REGION 1..394: note = Variant of terminal deoxynucleotidyl transferase
MHHHHHHGGSGHPEGNTPEKEVPSVIARHVSPYACQRKTTLNNYNKKITDALEIMAENYKFKENLQARLEARRAASVLKSLPFEVTSMKDIQGLPCITDDVRPVIEEIIEVGESSRVKEILNDERYKAFKQFTSVFGVGVKTAEKWYRMGLRTLEEVKASKFLKLNKMQKAGFLYYEDLASGVTKEEKDAVLDIVKETVWTVDPDALVTIVGGFRRGKPQGHDVDLLITIPGRPTDPELLHNVVDLLKKQGLLLYGDIRERTFVEGQLPNPKPDQLDNHQKCFAILKLYRPKVDNSAVGTSKKVDMAEVKDWKAVRVDLVVAPDEQAAYAKLGWTGSGMFRRDTRRYAEEERDMLLDNHGLYDLKKGIFLSADSEEEIFGHLDLDYLEPWERNA

SEQ ID NO: 6307 - DNA, 1182 bp, synthetic construct
  misc_feature 1..1182: note = Variant of terminal deoxynucleotidyl transferase
  source 1..1182: mol_type = other DNA
atgcaccatcatcaccatcacgggggctccggccatccggaaggtaataccccggagaaggaggtgccgagcgttatcgcccgtcatgttagtccgtacgcgtgccagcgcaagaccacgctgaataactacaacaaaaagatcaccgacgcgctggagatcatggccgagaactacaagtttaaagagaacccgcaggcgcgcctggaggcccgtcgcgccgcgagtgtcctgaaaagcctgccgttcgaggttaccagcatgaaagacatccaaggtctgccgtgcattaccgacgacgtacgtcctgtgatcgaagagatcatcgaagtaggcgagagcagccgtgttaaagaaatcctcaatgacgagcgctacaaggcctttaagcagttcaccagcgtgttcggtgtgggcgtcaagaccgcggaaaagtggtaccgtatgggcctccgtacgctggaagaagtaaaggccagtaagttcctgaagctgaacaagatgcagaaggcgggcttcctgtactacgaggatctggcgagcggtgttacgaaagaagaaaaagatgccgttctggatatcgtgaaggaaacggtgtggactgttgatccggatgcgctggtgaccatcgtgggcggtttccgccgtggcaaacctcagggccacgacgttgacctgctgatcacgattccgggccgtcctacggatccggagctgctccacaacgtggttgatctgctcaagaagcaaggtctgctgctgtacggggacatccgtgagcgtacgttcgtggaggggcaactgccaaatcctaaacctgaccagctggacaatcatcagaagtgcttcgccattctcaagctgtaccgcccgaaggtggataacagtgcggttgggacgtcgaagaaagtcgacatggctgaggttaaggattggaaagcggttcgtgtggatctggtggtcgctccagatgagcagttcgcctatgcgaaactcggttggacgggcagcggcatgtttcgtcgcgatactcgtcgctacgcggaggaagagcgcgacatgctgctcgacaaccatggtctctacgacctgaaaaagggcatttttctgagtgcggacagcgaagaagagattttcggtcatctggacctggattatctggagccgtgggaacgcaacgcg

SEQ ID NO: 6308 - protein, 394 aa, synthetic construct
  REGION 1..394: note = Variant of terminal deoxynucleotidyl transferase
MHHHHHHGGSGHPEGNTPEKEVPSVIARHVSPYACQRKTTLNNYNKKITDALEIMAENYKFKENPQARLEARRAASVLKSLPFEVTSMKDIQGLPCITDDVRPVIEEIIEVGESSRVKEILNDERYKAFKQFTSVFGVGVKTAEKWYRMGLRTLEEVKASKFLKLNKMQKAGFLYYEDLASGVTKEEKDAVLDIVKETVWTVDPDALVTIVGGFRRGKPQGHDVDLLITIPGRPTDPELLHNVVDLLKKQGLLLYGDIRERTFVEGQLPNPKPDQLDNHQKCFAILKLYRPKVDNSAVGTSKKVDMAEVKDWKAVRVDLVVAPDEQFAYAKLGWTGSGMFRRDTRRYAEEERDMLLDNHGLYDLKKGIFLSADSEEEIFGHLDLDYLEPWERNA

SEQ ID NO: 6309 - DNA, 1182 bp, synthetic construct
  misc_feature 1..1182: note = Variant of terminal deoxynucleotidyl transferase
  source 1..1182: mol_type = other DNA
atgcaccatcatcaccatcacgggggctccggccatccggaaggtaataccccggagaaggaggtgccgagcgttatcgcccgtcatgttagtccgtacgcgtgccagcgcaagaccacgctgaataactacaacaaaaagatcaccgacgcgctggagatcatggccgagaactacaagtttaaagagaacctgcaggcgcgcctggaggcccgtcgcgccgcgagtgtcctgaaaagcctgccgttcgaggttaccagcatgaaagacatccaaggtctgccgtgcattaccgacgacgtacgtcctgtgatcgaagagatcatcgaagtaggcgagagcagccgtgttaaagaaatcctcaatgacgagcgctacaaggcctttaagcagttcaccagcgtgttcggtgtgggcgtcaagaccgcggaaaagtggtaccgtatgggcctccgtacgctggaagaagtaaagcgtagtaagttcctgaagctgaacaagatgcagaaggcgggcttcctgtactacgaggatctggcgagcggtgttacgaaagaagaaaaagatgccgttctggatatcgtgaaggaaacggtgtggactgttgatccggatgcgctggtgaccatcgtgggcggtttccgccgtggcaaacctcagggccacgacgttgacctgctgatcacgattccgggccgtcctacggatccggagctgctccacaacgtggttgatctgctcaagaagcaaggtctgctgctgtacggggacatccgtgagcgtacgttcgtggaggggcaactgccaaatcctaaacctgaccagctggacaatcatcagaagtgcttcgccattctcaagctgtaccgcccgaaggtggataacagtgcggttgggacgtcgaagaaagtcgacatggctgaggttaaggattggaaagcggttcgtgtggatctggtggtcgctccagatgagcagttcgcctatgcgaaactcggttggacgggcagcggcatgtttcgtcgcgatactcgtcgctacgcggaggaagagcgcgacatgctgctcgacaaccatggtctctacgacctgaaaaagggcatttttctgagtgcggacagcgaagaagagattttcggtcatctggacctggattatctggagccgtgggaacgcaacgcg

SEQ ID NO: 6310 - protein, 394 aa, synthetic construct
  REGION 1..394: note = Variant of terminal deoxynucleotidyl transferase
MHHHHHHGGSGHPEGNTPEKEVPSVIARHVSPYACQRKTTLNNYNKKITDALEIMAENYKFKENLQARLEARRAASVLKSLPFEVTSMKDIQGLPCITDDVRPVIEEIIEVGESSRVKEILNDERYKAFKQFTSVFGVGVKTAEKWYRMGLRTLEEVKRSKFLKLNKMQKAGFLYYEDLASGVTKEEKDAVLDIVKETVWTVDPDALVTIVGGFRRGKPQGHDVDLLITIPGRPTDPELLHNVVDLLKKQGLLLYGDIRERTFVEGQLPNPKPDQLDNHQKCFAILKLYRPKVDNSAVGTSKKVDMAEVKDWKAVRVDLVVAPDEQFAYAKLGWTGSGMFRRDTRRYAEEERDMLLDNHGLYDLKKGIFLSADSEEEIFGHLDLDYLEPWERNA

SEQ ID NO: 6311 - DNA, 1182 bp, synthetic construct
  misc_feature 1..1182: note = Variant of terminal deoxynucleotidyl transferase
  source 1..1182: mol_type = other DNA
atgcaccatcatcaccatcacgggggctccggccatccggaaggtaataccccggagaaggaggtgccgagcgttatcgcccgtcatgttagtccgtacgcgtgccagcgcaagaccacgctgaataactacaacaaaaagatcaccgacgcgctggagatcatggccgagaactacaagtttaaagagaacctgcaggcgcgcctggaggcccgtcgcgccgcgagtgtcctgaaaagcctgccgttcgaggttaccagcatgaaagacatccaaggtctgccgtgcattaccgacgacgtacgtcctgtgatcgaagagatcatcgaagtaggcgagagcagccgtgttaaagaaatcctcaatgacgagcgctacaaggcctttaagcagttcaccagcgtgttcggtgtgggcgtcaagaccgcggaaaagtggtaccgtatgggcctccgtacgctggaagaagtaaagcagagtaagttcctgaagctgaacaagatgcagaaggcgggcttcctgtactacgaggatctggcgagcggtgttacgaaagaagaaaaagatgccgttctggatatcgtgaaggaaacggtgtggactgttgatccggatgcgctggtgaccatcgtgggcggtttccgccgtggcaaacctcagggccacgacgttgacctgctgatcacgattccgggccgtcctacggatccggagctgctccacaacgtggttgatctgctcaagaagcaaggtctgctgctgtacggggacatccgtgagcgtacgttcgtggaggggcaactgccaaatcctaaacctgaccagctggacaatcatcagaagtgcttcgccattctcaagctgtaccgcccgaaggtggataacagtgcggttgggacgtcgaagaaagtcgacatggctgaggttaaggattggaaagcggttcgtgtggatctggtggtcgctccagatgagcagttcgcctatgcgaaactcggttggacgggcagcggcatgtttcgtcgcgatactcgtcgctacgcggaggaagagcgcgacatgctgctcgacaaccatggtctctacgacctgaaaaagggcatttttctgagtgcggacagcgaagaagagattttcggtcatctggacctggattatctggagccgtgggaacgcaacgcg

SEQ ID NO: 6312 - protein, 394 aa, synthetic construct
  REGION 1..394: note = Variant of terminal deoxynucleotidyl transferase
MHHHHHHGGSGHPEGNTPEKEVPSVIARHVSPYACQRKTTLNNYNKKITDALEIMAENYKFKENLQARLEARRAASVLKSLPFEVTSMKDIQGLPCITDDVRPVIEEIIEVGESSRVKEILNDERYKAFKQFTSVFGVGVKTAEKWYRMGLRTLEEVKQSKFLKLNKMQKAGFLYYEDLASGVTKEEKDAVLDIVKETVWTVDPDALVTIVGGFRRGKPQGHDVDLLITIPGRPTDPELLHNVVDLLKKQGLLLYGDIRERTFVEGQLPNPKPDQLDNHQKCFAILKLYRPKVDNSAVGTSKKVDMAEVKDWKAVRVDLVVAPDEQFAYAKLGWTGSGMFRRDTRRYAEEERDMLLDNHGLYDLKKGIFLSADSEEEIFGHLDLDYLEPWERNA

SEQ ID NO: 6313 - DNA, 1182 bp, synthetic construct
  misc_feature 1..1182: note = Variant of terminal deoxynucleotidyl transferase
  source 1..1182: mol_type = other DNA
atgcaccatcatcaccatcacgggggctccggccatccggaaggtaataccccggagaaggaggtgccgagcgttatcgcccgtcatgttagtccgtacgcgtgccagcgcaagaccacgctgaataactacaacaaaaagatcaccgacgcgctggagatcatggccgagaactacaagtttaaagagaacctgcaggcgcgcctggaggcccgtcgcgccgcgagtgtcctgaaaagcctgccgttcgaggttaccagcatgaaagacatccaaggtctgccgtgcattaccgacgacgtacgtcctgtgatcgaagagatcatcgaagtaggcgagagcagccgtgttaaagaaatcctcaatgacgagcgctacaaggcctttaagcagttcaccagcgtgttcggtgtgggcgtcaagaccgcggaaaagtggtaccgtatgggcctccgtacgctggaagaagtaaaggccagtaagttcctgaagctgaacaagatgcagaaggcgggcttcctgtactacgaggatctggcgagcggtgttacgaaagaagaaaaagatgccgttctggatatcgtgaaggaaacggtgtggactgttgatccggatgcgctggtgaccatcgtgggcggtttccgccgtggcaaacctcagggccacgacgttgacctgctgatcacgattccgggccgtcctacggatccggagctgctccacaacgtggttgatctgctcaagaagcaaggtctgctgctgtacggggacatccgtgagcgtacgttcgtggaggggcaactgccaaatcctaaacctgacctgctggacaatcatcagaagtgcttcgccattctcaagctgtaccgcccgaaggtggataacagtgcggttgggacgtcgaagaaagtcgacatggctgaggttaaggattggaaagcggttcgtgtggatctggtggtcgctccagatgagcagttcgcctatgcgaaactcggttggacgggcagcggcatgtttcgtcgcgatactcgtcgctacgcggaggaagagcgcgacatgctgctcgacaaccatggtctctacgacctgaaaaagggcatttttctgagtgcggacagcgaagaagagattttcggtcatctggacctggattatctggagccgtgggaacgcaacgcg

SEQ ID NO: 6314 - protein, 394 aa, synthetic construct
  REGION 1..394: note = Variant of terminal deoxynucleotidyl transferase
MHHHHHHGGSGHPEGNTPEKEVPSVIARHVSPYACQRKTTLNNYNKKITDALEIMAENYKFKENLQARLEARRAASVLKSLPFEVTSMKDIQGLPCITDDVRPVIEEIIEVGESSRVKEILNDERYKAFKQFTSVFGVGVKTAEKWYRMGLRTLEEVKASKFLKLNKMQKAGFLYYEDLASGVTKEEKDAVLDIVKETVWTVDPDALVTIVGGFRRGKPQGHDVDLLITIPGRPTDPELLHNVVDLLKKQGLLLYGDIRERTFVEGQLPNPKPDLLDNHQKCFAILKLYRPKVDNSAVGTSKKVDMAEVKDWKAVRVDLVVAPDEQFAYAKLGWTGSGMFRRDTRRYAEEERDMLLDNHGLYDLKKGIFLSADSEEEIFGHLDLDYLEPWERNA

SEQ ID NO: 6315 - DNA, 1182 bp, synthetic construct
  misc_feature 1..1182: note = Variant of terminal deoxynucleotidyl transferase
  source 1..1182: mol_type = other DNA
atgcaccatcatcaccatcacgggggctccggccatccggaaggtaataccccggagaaggaggtgccgagcgttatcgcccgtcatgttagtccgtacgcgtgccagcgcaagaccacgctgaataactacaacaaaaagatcaccgacgcgctggaaatcatggccatgaactacaagtttaaagagaacctgcaggcgcgcctggaggcccgtcgcgccgcgagtgtcctgaaaagcctgccgttcgaggttaccagcatgaaagacatccaaggtctgccgtgcattaccgacgacgtacgtcctgtgatcgaagagatcatcgaagtaggcgagagcagccgtgttaaagaaatcctcaatgacgagcgctacaaggcctttaagcagttcaccagcgtgttcggtgtgggcgtcaagaccgcggaaaagtggtaccgtatgggcctccgtacgctggaagaagtaaaggccagtaagttcctgaagctgaacaagatgcagaaggcgggcttcctgtactacgaggatctggcgagcggtgttacgaaagaagaaaaagatgccgttctggatatcgtgaaggaaacggtgtggactgttgatccggatgcgctggtgaccatcgtgggcggtttccgccgtggcaaacctcagggccacgacgttgacctgctgatcacgattccgggccgtcctacggatccggagctgctccacaacgtggttgatctgctcaagaagcaaggtctgctgctgtacggggacatccgtgagcgtacgttcgtggaggggcaactgccaaatcctaaacctgaccagctggacaatcatcagaagtgcttcgccattctcaagctgtaccgcccgaaggtggataacagtgcggttgggacgtcgaagaaagtcgacatggctgaggttaaggattggaaagcggttcgtgtggatctggtggtcgctccagatgagcagttcgcctatgcgaaactcggttggacgggcagcggcatgtttcgtcgcgatactcgtcgctacgcggaggaagagcgcgacatgctgctcgacaaccatggtctctacgacctgaaaaagggcatttttctgagtgcggacagcgaagaagagattttcggtcatctggacctggattatctggagccgtgggaacgcaacgcg

SEQ ID NO: 6316 - protein, 394 aa, synthetic construct
  REGION 1..394: note = Variant of terminal deoxynucleotidyl transferase
MHHHHHHGGSGHPEGNTPEKEVPSVIARHVSPYACQRKTTLNNYNKKITDALEIMAMNYKFKENLQARLEARRAASVLKSLPFEVTSMKDIQGLPCITDDVRPVIEEIIEVGESSRVKEILNDERYKAFKQFTSVFGVGVKTAEKWYRMGLRTLEEVKASKFLKLNKMQKAGFLYYEDLASGVTKEEKDAVLDIVKETVWTVDPDALVTIVGGFRRGKPQGHDVDLLITIPGRPTDPELLHNVVDLLKKQGLLLYGDIRERTFVEGQLPNPKPDQLDNHQKCFAILKLYRPKVDNSAVGTSKKVDMAEVKDWKAVRVDLVVAPDEQFAYAKLGWTGSGMFRRDTRRYAEEERDMLLDNHGLYDLKKGIFLSADSEEEIFGHLDLDYLEPWERNA

SEQ ID NO: 6317 - DNA, 1182 bp, synthetic construct
  misc_feature 1..1182: note = Variant of terminal deoxynucleotidyl transferase
  source 1..1182: mol_type = other DNA
atgcaccatcatcaccatcacgggggctccggccatccggaaggtaataccccggagaaggaggtgccgagcgttatcgcccgtcatgttagtccgtacgcgtgccagcgcaagaccacgctgaataactacaacaaaaagatcaccgacgcgctggagatcatggccgagaactacaagtttaaagagaacctgcaggcgcgcctggaggcccgtcgcgccgcgagtgtcctgaaaagcctgccgttcgaggttaccagcatgaaagacatccaaggtctgccgtgcattaccgacgacgtacgtcctgtgatcgaagagatcatcgaagtaggcgagagcagccgtgttaaagaaatcctcaatgacgagcgctacaaggcctttaagcagttcaccagcgtgttcggtgtgggcgtcaagaccgcggaaaagtggtaccgtatgggcctccgtacgctggaagaagtaaagaatagtaagttcctgaagctgaacaagatgcagaaggcgggcttcctgtactacgaggatctggcgagcggtgttacgaaagaagaaaaagatgccgttctggatatcgtgaaggaaacggtgtggactgttgatccggatgcgctggtgaccatcgtgggcggtttccgccgtggcaaacctcagggccacgacgttgacctgctgatcacgattccgggccgtcctacggatccggagctgctccacaacgtggttgatctgctcaagaagcaaggtctgctgctgtacggggacatccgtgagcgtacgttcgtggaggggcaactgccaaatcctaaacctgaccagctggacaatcatcagaagtgcttcgccattctcaagctgtaccgcccgaaggtggataacagtgcggttgggacgtcgaagaaagtcgacatggctgaggttaaggattggaaagcggttcgtgtggatctggtggtcgctccagatgagcagttcgcctatgcgaaactcggttggacgggcagcggcatgtttcgtcgcgatactcgtcgctacgcggaggaagagcgcgacatgctgctcgacaaccatggtctctacgacctgaaaaagggcatttttctgagtgcggacagcgaagaagagattttcggtcatctggacctggattatctggagccgtgggaacgcaacgcg

SEQ ID NO: 6318 - protein, 394 aa, synthetic construct
  REGION 1..394: note = Variant of terminal deoxynucleotidyl transferase
MHHHHHHGGSGHPEGNTPEKEVPSVIARHVSPYACQRKTTLNNYNKKITDALEIMAENYKFKENLQARLEARRAASVLKSLPFEVTSMKDIQGLPCITDDVRPVIEEIIEVGESSRVKEILNDERYKAFKQFTSVFGVGVKTAEKWYRMGLRTLEEVKNSKFLKLNKMQKAGFLYYEDLASGVTKEEKDAVLDIVKETVWTVDPDALVTIVGGFRRGKPQGHDVDLLITIPGRPTDPELLHNVVDLLKKQGLLLYGDIRERTFVEGQLPNPKPDQLDNHQKCFAILKLYRPKVDNSAVGTSKKVDMAEVKDWKAVRVDLVVAPDEQFAYAKLGWTGSGMFRRDTRRYAEEERDMLLDNHGLYDLKKGIFLSADSEEEIFGHLDLDYLEPWERNA

SEQ ID NO: 6319 - DNA, 1182 bp, synthetic construct
  misc_feature 1..1182: note = Variant of terminal deoxynucleotidyl transferase
  source 1..1182: mol_type = other DNA
atgcaccatcatcaccatcacgggggctccggccatccggaaggtaataccccggagaaggaggtgccgagcgttatcgcccgtcatgttagtccgtacgcgtgccagcgcaagaccacgctgaataactacaacaaaaagatcaccgacgcgctggagatcatggccgagaactacaagtttaaagagaacctgcaggcgcgcctggaggcccgtcgcgccgcgagtgtcctgaaaagcctgccgttcgaggttaccagcatgaaagacatccaaggtctgccgtgcattaccgacgacgtacgtcctgtgatcgaagagatcatcgaagtaggcgagagcagccgtgttaaagaaatcctcaatgacgagcgctacaaggcctttaagcagttcaccagcgtgttcggtgtgggcgtcaagaccgcggaaaagtggtaccgtatgggcctccgtacgctggaagaagtaaaggccagtaagttcctgaagctgaacaagatgcagaaggcgggcttcctgtactacgaggatctggcgagcggtgttacgaaagaagaaaaagatgccgttctggatatcgtgaaggaaacggtgtggactgttgatccggatgcgctggtgaccatcgtgggcggtttccgccgtggcaaacctcagggccacgacgttgacctgctgatcacgattccgggccgtcctacggatccggagctgctccacaacgtggttgatctgctcaagaagcaaggtctgctgctgtacggggacatccgtgagcgtacgttcgtggaggggcaactgccaaatcctaaacctgaccagctggacaatcatcagaagtgcttcgccattctcaagctgtaccgcccgaaggtggataacagtgcggttgggacgtcgaagaaagtcgacatggctgaggttaaggattggaaagcggttcgtgtggatctggtggtcgctccagatgagcagttcgcctatgcgaaactcggttggacgggcagcggcatgtttcgtcgcgatactcgtcgctacgcggaggaagagcgcgacatgctgctcgacaaccatggtctctacgacctgaaaaagggcatctttctgaaggcggacagcgaagaagagattttcggtcatctggacctggattatctggagccgtgggaacgcaacgcg

SEQ ID NO: 6320 - protein, 394 aa, synthetic construct
  REGION 1..394: note = Variant of terminal deoxynucleotidyl transferase
MHHHHHHGGSGHPEGNTPEKEVPSVIARHVSPYACQRKTTLNNYNKKITDALEIMAENYKFKENLQARLEARRAASVLKSLPFEVTSMKDIQGLPCITDDVRPVIEEIIEVGESSRVKEILNDERYKAFKQFTSVFGVGVKTAEKWYRMGLRTLEEVKASKFLKLNKMQKAGFLYYEDLASGVTKEEKDAVLDIVKETVWTVDPDALVTIVGGFRRGKPQGHDVDLLITIPGRPTDPELLHNVVDLLKKQGLLLYGDIRERTFVEGQLPNPKPDQLDNHQKCFAILKLYRPKVDNSAVGTSKKVDMAEVKDWKAVRVDLVVAPDEQFAYAKLGWTGSGMFRRDTRRYAEEERDMLLDNHGLYDLKKGIFLKADSEEEIFGHLDLDYLEPWERNA

SEQ ID NO: 6321 - DNA, 1182 bp, synthetic construct
  misc_feature 1..1182: note = Variant of terminal deoxynucleotidyl transferase
  source 1..1182: mol_type = other DNA
atgcaccatcatcaccatcacgggggctccggccatccggaaggtaataccccggagaaggaggtgccgagcgttatcgcccgtcatgttagtccgtacgcgtgccagcgcaagaccacgctgaataactacaacaaaaagatcaccgacgcgctggagatcatggccgagaactacaagtttaaagagaacctgcaggcgcgcctggaggcccgtcgcgccgcgagtgtcctgaaaagcctgccgttcgaggttaccagcatgaaagacatccaaggtctgccgtgcattaccgacgacgtacgtcctgtgatcgaagagatcatcgaagtaggcgagagcagccgtgttaaagaaatcctcaatgacgagcgctacaaggcctttaagcagttcaccagcgtgttcggtgtgggcgtcaagaccgcggaaaagtggtaccgtatgggcctccgtacgctggaagaagtaaagagtagtaagttcctgaagctgaacaagatgcagaaggcgggcttcctgtactacgaggatctggcgagcggtgttacgaaagaagaaaaagatgccgttctggatatcgtgaaggaaacggtgtggactgttgatccggatgcgctggtgaccatcgtgggcggtttccgccgtggcaaacctcagggccacgacgttgacctgctgatcacgattccgggccgtcctacggatccggagctgctccacaacgtggttgatctgctcaagaagcaaggtctgctgctgtacggggacatccgtgagcgtacgttcgtggaggggcaactgccaaatcctaaacctgaccagctggacaatcatcagaagtgcttcgccattctcaagctgtaccgcccgaaggtggataacagtgcggttgggacgtcgaagaaagtcgacatggctgaggttaaggattggaaagcggttcgtgtggatctggtggtcgctccagatgagcagttcgcctatgcgaaactcggttggacgggcagcggcatgtttcgtcgcgatactcgtcgctacgcggaggaagagcgcgacatgctgctcgacaaccatggtctctacgacctgaaaaagggcatttttctgagtgcggacagcgaagaagagattttcggtcatctggacctggattatctggagccgtgggaacgcaacgcg

SEQ ID NO: 6322 - protein, 394 aa, synthetic construct
  REGION 1..394: note = Variant of terminal deoxynucleotidyl transferase
MHHHHHHGGSGHPEGNTPEKEVPSVIARHVSPYACQRKTTLNNYNKKITDALEIMAENYKFKENLQARLEARRAASVLKSLPFEVTSMKDIQGLPCITDDVRPVIEEIIEVGESSRVKEILNDERYKAFKQFTSVFGVGVKTAEKWYRMGLRTLEEVKSSKFLKLNKMQKAGFLYYEDLASGVTKEEKDAVLDIVKETVWTVDPDALVTIVGGFRRGKPQGHDVDLLITIPGRPTDPELLHNVVDLLKKQGLLLYGDIRERTFVEGQLPNPKPDQLDNHQKCFAILKLYRPKVDNSAVGTSKKVDMAEVKDWKAVRVDLVVAPDEQFAYAKLGWTGSGMFRRDTRRYAEEERDMLLDNHGLYDLKKGIFLSADSEEEIFGHLDLDYLEPWERNA

SEQ ID NO: 6323 - DNA, 1182 bp, synthetic construct
  misc_feature 1..1182: note = Variant of terminal deoxynucleotidyl transferase
  source 1..1182: mol_type = other DNA
atgcaccatcatcaccatcacgggggctccggccatccggaaggtaataccccggagaaggaggtgccgagcgttatcgcccgtcatgttagtccgtacgcgtgccagcgcaagaccacgctgaataactacaacaaaaagatcaccgacgcgctggagatcatggccgagaactacaagtttaaagagaacctgcaggcgcgcctggaggcccgtcgcgccgcgagtgtcctgaaaagcctgccgttcgaggttaccagcatgaaagacatccaaggtctgccgtgcattaccgacgacgtacgtcctgtgatcgaagagatcatcgaagtaggcgagagcagccgtgttaaagaaatcctcaatgacgagcgctacaaggcctttaagcagttcaccagcgtgttcggtgtgggcgtcaagaccgcggaaaagtggtaccgtatgggcctccgtacgctggaagaagtaaaggccagtaagttcctgaagctgaacaagatgcagaaggcgggcttcctgtactacgaggatctggcgagcggtgttacgaaagaagaaaaagatgccgttctggatatcgtgaaggaaacggtgtggactgttgatccggatgcgctggtgaccatcgtgggcggtttccgccgtggcaaacctcagggccacgacgttgacctgctgatcacgattccgggccgtcctacggatccggagctgctccacaacgtggttgatctgctcaagaagcaaggtctgctgctgtacggggacatccgtgagcgtacgttcgtggaggggcaactgccaaatcctaaacctgaccagctggacaatcatcagaagtgcttcgccattctcaagctgtaccgcccgaaggtggataacagtgcggttgggacgtcgaagaaagtcgacatggctgaggttaaggattggaaagcggttcgtgtggatctggtggtcgctccagatgagcagttcgcctatgcgaaactcggttggacgggcagcggcatgtttcgtcgcgatactcgtcgctacgcggaggaagagcgcgacatgctgctcgacaaccatggtctctacgacctgaaaaagggcatctttctgagtgcgggtagcgaagaagagattttcggtcatctggacctggattatctggagccgtgggaacgcaacgcg

SEQ ID NO: 6324 - protein, 394 aa, synthetic construct
  REGION 1..394: note = Variant of terminal deoxynucleotidyl transferase
MHHHHHHGGSGHPEGNTPEKEVPSVIARHVSPYACQRKTTLNNYNKKITDALEIMAENYKFKENLQARLEARRAASVLKSLPFEVTSMKDIQGLPCITDDVRPVIEEIIEVGESSRVKEILNDERYKAFKQFTSVFGVGVKTAEKWYRMGLRTLEEVKASKFLKLNKMQKAGFLYYEDLASGVTKEEKDAVLDIVKETVWTVDPDALVTIVGGFRRGKPQGHDVDLLITIPGRPTDPELLHNVVDLLKKQGLLLYGDIRERTFVEGQLPNPKPDQLDNHQKCFAILKLYRPKVDNSAVGTSKKVDMAEVKDWKAVRVDLVVAPDEQFAYAKLGWTGSGMFRRDTRRYAEEERDMLLDNHGLYDLKKGIFLSAGSEEEIFGHLDLDYLEPWERNA

SEQ ID NO: 6325 - DNA, 1182 bp, synthetic construct
  misc_feature 1..1182: note = Variant of terminal deoxynucleotidyl transferase
  source 1..1182: mol_type = other DNA
atgcaccatcatcaccatcacgggggctccggccatccggaaggtaataccccggagaaggaggtgccgagcgttatcgcccgtcatgttagtccgtacgcgtgccagcgcaagaccacgctgaataactacaacaaaaagatcaccgacgcgctggagatcatggccgagaactacaagtttaaaggtaacctgcaggcgcgcctggaggcccgtcgcgccgcgagtgtcctgaaaagcctgccgttcgaggttaccagcatgaaagacatccaaggtctgccgtgcattaccgacgacgtacgtcctgtgatcgaagagatcatcgaagtaggcgagagcagccgtgttaaagaaatcctcaatgacgagcgctacaaggcctttaagcagttcaccagcgtgttcggtgtgggcgtcaagaccgcggaaaagtggtaccgtatgggcctccgtacgctggaagaagtaaaggccagtaagttcctgaagctgaacaagatgcagaaggcgggcttcctgtactacgaggatctggcgagcggtgttacgaaagaagaaaaagatgccgttctggatatcgtgaaggaaacggtgtggactgttgatccggatgcgctggtgaccatcgtgggcggtttccgccgtggcaaacctcagggccacgacgttgacctgctgatcacgattccgggccgtcctacggatccggagctgctccacaacgtggttgatctgctcaagaagcaaggtctgctgctgtacggggacatccgtgagcgtacgttcgtggaggggcaactgccaaatcctaaacctgaccagctggacaatcatcagaagtgcttcgccattctcaagctgtaccgcccgaaggtggataacagtgcggttgggacgtcgaagaaagtcgacatggctgaggttaaggattggaaagcggttcgtgtggatctggtggtcgctccagatgagcagttcgcctatgcgaaactcggttggacgggcagcggcatgtttcgtcgcgatactcgtcgctacgcggaggaagagcgcgacatgctgctcgacaaccatggtctctacgacctgaaaaagggcatttttctgagtgcggacagcgaagaagagattttcggtcatctggacctggattatctggagccgtgggaacgcaacgcg

SEQ ID NO: 6326 - protein, 394 aa, synthetic construct
  REGION 1..394: note = Variant of terminal deoxynucleotidyl transferase
MHHHHHHGGSGHPEGNTPEKEVPSVIARHVSPYACQRKTTLNNYNKKITDALEIMAENYKFKGNLQARLEARRAASVLKSLPFEVTSMKDIQGLPCITDDVRPVIEEIIEVGESSRVKEILNDERYKAFKQFTSVFGVGVKTAEKWYRMGLRTLEEVKASKFLKLNKMQKAGFLYYEDLASGVTKEEKDAVLDIVKETVWTVDPDALVTIVGGFRRGKPQGHDVDLLITIPGRPTDPELLHNVVDLLKKQGLLLYGDIRERTFVEGQLPNPKPDQLDNHQKCFAILKLYRPKVDNSAVGTSKKVDMAEVKDWKAVRVDLVVAPDEQFAYAKLGWTGSGMFRRDTRRYAEEERDMLLDNHGLYDLKKGIFLSADSEEEIFGHLDLDYLEPWERNA

SEQ ID NO: 6327 - DNA, 1182 bp, synthetic construct
  misc_feature 1..1182: note = Variant of terminal deoxynucleotidyl transferase
  source 1..1182: mol_type = other DNA
atgcaccatcatcaccatcacgggggctccggccatccggaaggtaataccccggagaaggaggtgccgagcgttatcgcccgtcatgttagtccgtacgcgtgccagcgcaagaccacgctgaataactacaacaaaaagatcaccgacgcgctggagatcatggccgagaactacaagtttaaagagaacctgcaggcgcgcctggaggcccgtcgcgccgcgagtgtcctgaaaagcctgccgttcgaggttaccagcatgaaagacatccaaggtctgccgtgcattaccgacgacgtacgtcctgtgatcgaagagatcatcgaagtaggcgagagcagccgtgttaaagaaatcctcaatgacgagcgctacaaggcctttaagcagttcaccagcgtgttcggtgtgggcgtcaagaccgcggaaaagtggtaccgtatgggcctccgtacgctggaagaagtaaaggccagtaagttcctgaagctgaacaagatgcagaaggcgggcttcctgtactacgaggatctggcgagcggtgttacgaaagaagaaaaagatgccgttctggatatcgtgaaggaaacggtgtggactgttgatccggatgcgctggtgaccatcgtgggcggtttccgccgtggcaaacctcagggccacgacgttgacctgctgatcacgattccgggccgtcctacggatccggagctgctccacaacgtggttgatctgctcaagaagcaaggtctgctgctgtacggggacatccgtgagcgtacgttcgtggaggggcaactgccaaatcctaaacctgaccagctggacaatcatcagaagtgcttcgccattctcaagctgtaccgcccgaaggtggataacagtgcggttgggacgtcgaagaaagtcgacatggctgaggttaaggattggaaagcggttcgtgtggatctggtggtcgctccagatgagcagttcgcctatgcgaaactcggttggacgggcagcggcatgtttcgtcgcgatactcgtcgctacgcggaggaagagcgcgacatgctgctcgacaaccatggtctctacgacctgaaaaagggcatctttctgccggcggacagcgaagaagagattttcggtcatctggacctggattatctggagccgtgggaacgcaacgcg

SEQ ID NO: 6328 - protein, 394 aa, synthetic construct
  REGION 1..394: note = Variant of terminal deoxynucleotidyl transferase
MHHHHHHGGSGHPEGNTPEKEVPSVIARHVSPYACQRKTTLNNYNKKITDALEIMAENYKFKENLQARLEARRAASVLKSLPFEVTSMKDIQGLPCITDDVRPVIEEIIEVGESSRVKEILNDERYKAFKQFTSVFGVGVKTAEKWYRMGLRTLEEVKASKFLKLNKMQKAGFLYYEDLASGVTKEEKDAVLDIVKETVWTVDPDALVTIVGGFRRGKPQGHDVDLLITIPGRPTDPELLHNVVDLLKKQGLLLYGDIRERTFVEGQLPNPKPDQLDNHQKCFAILKLYRPKVDNSAVGTSKKVDMAEVKDWKAVRVDLVVAPDEQFAYAKLGWTGSGMFRRDTRRYAEEERDMLLDNHGLYDLKKGIFLPADSEEEIFGHLDLDYLEPWERNA

SEQ ID NO: 6329 - DNA, 1182 bp, synthetic construct
  misc_feature 1..1182: note = Variant of terminal deoxynucleotidyl transferase
  source 1..1182: mol_type = other DNA
atgcaccatcatcaccatcacgggggctccggccatccggaaggtaataccccggagaaggaggtgccgagcgttatcgcccgtcatgttagtccgtacgcgtgccagcgcaagaccacgctgaataactacaacaaaaagatcaccgacgcgctggagatcatggccgagaactacaagtttaaagagaacctgcaggcgcgcctggaggcccgtcgcgccgcgagtgtcctgaaaagcctgccgttcgaggttaccagcatgaaagacatccaaggtctgccgtgcattaccgacgacgtacgtcctgtgatcgaagagatcatcgaagtaggcgagagcagccgtgttaaagaaatcctcaatgacgagcgctacaaggcctttaagcagttcaccagcgtgttcggtgtgggcgtcaagaccgcggaaaagtggtaccgtatgggcctccgtacgctggaagaagtaaaggccagtaagttcctgaagctgaacaagatgcagaaggcgggcttcctgtactacgaggatctggcgagcggtgttacgaaagaagaaaaagatgccgttctggatatcgtgaaggaaacggtgtggactgttgatccggatgcgctggtgaccatcgtgggcggtttccgccgtggcaaacctcagggccacgacgttgacctgctgatcacgattccgggccgtcctacggatccggagctgctccacaacgtggttgatctgctcaagaagcaaggtctgctgctgtacggggacatccgtgagcgtacgttcgtggaggggcaactgccaaatcctaaacctgaccagctggacaatcatcagaagtgcttcgccattctcaagctgtaccgcccgaaggtggataacagtgcggttgggacgtcgaagaaagtcgacatggctgaggttaaggattggaaagcggttcgtgtggatctggtggtcgctccagatgagcagttcgcctatgcgaaactcggttggacgggcagcggcatgtttcgtcgcgatactcgtcgctacgcggaggaagagcgcgacatgctgctcgacaaccatggtctctacgacctgaaaaagggcatctttctgagtgcgactagcgaagaagagattttcggtcatctggacctggattatctggagccgtgggaacgcaacgcg

SEQ ID NO: 6330 - protein, 394 aa, synthetic construct
  REGION 1..394: note = Variant of terminal deoxynucleotidyl transferase
MHHHHHHGGSGHPEGNTPEKEVPSVIARHVSPYACQRKTTLNNYNKKITDALEIMAENYKFKENLQARLEARRAASVLKSLPFEVTSMKDIQGLPCITDDVRPVIEEIIEVGESSRVKEILNDERYKAFKQFTSVFGVGVKTAEKWYRMGLRTLEEVKASKFLKLNKMQKAGFLYYEDLASGVTKEEKDAVLDIVKETVWTVDPDALVTIVGGFRRGKPQGHDVDLLITIPGRPTDPELLHNVVDLLKKQGLLLYGDIRERTFVEGQLPNPKPDQLDNHQKCFAILKLYRPKVDNSAVGTSKKVDMAEVKDWKAVRVDLVVAPDEQFAYAKLGWTGSGMFRRDTRRYAEEERDMLLDNHGLYDLKKGIFLSATSEEEIFGHLDLDYLEPWERNA

SEQ ID NO: 6331 - DNA, 1182 bp, synthetic construct
  misc_feature 1..1182: note = Variant of terminal deoxynucleotidyl transferase
  source 1..1182: mol_type = other DNA
atgcaccatcatcaccatcacgggggctccggccatccggaaggtaataccccggagaaggaggtgccgagcgttatcgcccgtcatgttagtccgtacgcgtgccagcgcaagaccacgctgaataactacaacaaaaagatcaccgacgcgctggagatcatggccgagaactacaagtttaaagagaacctgcaggcgcgcctggaggcccgtcgcgccgcgagtgtcctgaaaagcctgccgttcgaggttaccagcatgaaagacatccaaggtctgccgtgcattaccgacgacgtacgtcctgtgatcgaagagatcatcgaagtaggcgagagcagccgtgttaaagaaatcctcaatgacgagcgctacaaggcctttaagcagttcaccagcgtgttcggtgtgggcgtcaagaccgcggaaaagtggtaccgtatgggcctccgtacgctggaagaagtaaaggccagtaagttcctgaagctgaacaagatgcagaaggcgggcttcctgtactacgaggatctggcgagcggtgttacgaaagaagaaaaagatgccgttctggatatcgtgaaggaaacggtgtggactgttgatccggatgcgctggtgaccatcgtgggcggtttccgccgtggcaaaaatcagggccacgacgttgacctgctgatcacgattccgggccgtcctacggatccggagctgctccacaacgtggttgatctgctcaagaagcaaggtctgctgctgtacggggacatccgtgagcgtacgttcgtggaggggcaactgccaaatcctaaacctgaccagctggacaatcatcagaagtgcttcgccattctcaagctgtaccgcccgaaggtggataacagtgcggttgggacgtcgaagaaagtcgacatggctgaggttaaggattggaaagcggttcgtgtggatctggtggtcgctccagatgagcagttcgcctatgcgaaactcggttggacgggcagcggcatgtttcgtcgcgatactcgtcgctacgcggaggaagagcgcgacatgctgctcgacaaccatggtctctacgacctgaaaaagggcatttttctgagtgcggacagcgaagaagagattttcggtcatctggacctggattatctggagccgtgggaacgcaacgcg

SEQ ID NO: 6332 - protein, 394 aa, synthetic construct
  REGION 1..394: note = Variant of terminal deoxynucleotidyl transferase
MHHHHHHGGSGHPEGNTPEKEVPSVIARHVSPYACQRKTTLNNYNKKITDALEIMAENYKFKENLQARLEARRAASVLKSLPFEVTSMKDIQGLPCITDDVRPVIEEIIEVGESSRVKEILNDERYKAFKQFTSVFGVGVKTAEKWYRMGLRTLEEVKASKFLKLNKMQKAGFLYYEDLASGVTKEEKDAVLDIVKETVWTVDPDALVTIVGGFRRGKNQGHDVDLLITIPGRPTDPELLHNVVDLLKKQGLLLYGDIRERTFVEGQLPNPKPDQLDNHQKCFAILKLYRPKVDNSAVGTSKKVDMAEVKDWKAVRVDLVVAPDEQFAYAKLGWTGSGMFRRDTRRYAEEERDMLLDNHGLYDLKKGIFLSADSEEEIFGHLDLDYLEPWERNA

SEQ ID NO: 6333 - DNA, 1182 bp, synthetic construct
  misc_feature 1..1182: note = Variant of terminal deoxynucleotidyl transferase
  source 1..1182: mol_type = other DNA
atgcaccatcatcaccatcacgggggctccggccatccggaaggtaataccccggagaaggaggtgccgagcgttatcgcccgtcatgttagtccgtacgcgtgccagcgcaagaccacgctgaataactacaacaaaaagatcaccgacgcgctggagatcatggccgagaactacaagtttaaagagaacctgcaggcgcgcctggaggcccgtcgcgccgcgagtgtcctgaaaagcctgccgttcgaggttaccagcatgaaagacatccaaggtctgccgtgcattaccgacgacgtacgtcctgtgatcgaagagatcatcgaagtaggcgagagcagccgtgttaaagaaatcctcaatgacgagcgctacaaggcctttaagcagttcaccagcgtgttcggtgtgggcgtcaagaccgcggaaaagtggtaccgtatgggcaagcgtacgctggaagaagtaaaggccagtaagttcctgaagctgaacaagatgcagaaggcgggcttcctgtactacgaggatctggcgagcggtgttacgaaagaagaaaaagatgccgttctggatatcgtgaaggaaacggtgtggactgttgatccggatgcgctggtgaccatcgtgggcggtttccgccgtggcaaacctcagggccacgacgttgacctgctgatcacgattccgggccgtcctacggatccggagctgctccacaacgtggttgatctgctcaagaagcaaggtctgctgctgtacggggacatccgtgagcgtacgttcgtggaggggcaactgccaaatcctaaacctgaccagctggacaatcatcagaagtgcttcgccattctcaagctgtaccgcccgaaggtggataacagtgcggttgggacgtcgaagaaagtcgacatggctgaggttaaggattggaaagcggttcgtgtggatctggtggtcgctccagatgagcagttcgcctatgcgaaactcggttggacgggcagcggcatgtttcgtcgcgatactcgtcgctacgcggaggaagagcgcgacatgctgctcgacaaccatggtctctacgacctgaaaaagggcatttttctgagtgcggacagcgaagaagagattttcggtcatctggacctggattatctggagccgtgggaacgcaacgcg

SEQ ID NO: 6334 - protein, 394 aa, synthetic construct
  REGION 1..394: note = Variant of terminal deoxynucleotidyl transferase
MHHHHHHGGSGHPEGNTPEKEVPSVIARHVSPYACQRKTTLNNYNKKITDALEIMAENYKFKENLQARLEARRAASVLKSLPFEVTSMKDIQGLPCITDDVRPVIEEIIEVGESSRVKEILNDERYKAFKQFTSVFGVGVKTAEKWYRMGKRTLEEVKASKFLKLNKMQKAGFLYYEDLASGVTKEEKDAVLDIVKETVWTVDPDALVTIVGGFRRGKPQGHDVDLLITIPGRPTDPELLHNVVDLLKKQGLLLYGDIRERTFVEGQLPNPKPDQLDNHQKCFAILKLYRPKVDNSAVGTSKKVDMAEVKDWKAVRVDLVVAPDEQFAYAKLGWTGSGMFRRDTRRYAEEERDMLLDNHGLYDLKKGIFLSADSEEEIFGHLDLDYLEPWERNA

SEQ ID NO: 6335 - DNA, 1182 bp, synthetic construct
  misc_feature 1..1182: note = Variant of terminal deoxynucleotidyl transferase
  source 1..1182: mol_type = other DNA
atgcaccatcatcaccatcacgggggctccggccatccggaaggtaataccccggagaaggaggtgccgagcgttatcgcccgtcatgttagtccgtacgcgtgccagcgcaagaccacgctgaataactacaacaaaaagatcaccgacgcgctggagatcatggccgagaactacaagtttaaagagaacctgcaggcgcgcctggaggcccgtcgcgccgcgagtgtcctgaaaagcctgccgttcgaggttaccagcatgaaagacatccaaggtctgccgtgcattaccgacgacgtacgtcctgtgatcgaagagatcatcgaagtaggcgagagcagccgtgttaaagaaatcctcaatgacgagcgctacaaggcctttaagcagttcaccagcgtgttcggtgtgggcgtcaagaccgcggaaaagtggtaccgtatgggcctccgtacgctggaagaagtaaaggccagtaagttcctgaagctgaacaagatgcagaaggcgggcttcctgtactacgaggatctggcgagcggtgttacgaaagaagaaaaagatgccgttctggatatcgtgaaggaaacggtgtggactgttgatccggatgcgctggtgaccatcgtgggcggtttccgccgtggcaaacctcagggccacgacgttgacctgctgatcacgattccgggccgtcctacggatccggagctgctccacaacgtggttgatctgctcaagaagcaaggtctgctgctgtacggggacatccgtgagcgtacgttcgtggaggggcaactgccaaatcctaaacctgacgagctggacaatcatcagaagtgcttcgccattctcaagctgtaccgcccgaaggtggataacagtgcggttgggacgtcgaagaaagtcgacatggctgaggttaaggattggaaagcggttcgtgtggatctggtggtcgctccagatgagcagttcgcctatgcgaaactcggttggacgggcagcggcatgtttcgtcgcgatactcgtcgctacgcggaggaagagcgcgacatgctgctcgacaaccatggtctctacgacctgaaaaagggcatttttctgagtgcggacagcgaagaagagattttcggtcatctggacctggattatctggagccgtgggaacgcaacgcg

SEQ ID NO: 6336 - protein, 394 aa, synthetic construct
  REGION 1..394: note = Variant of terminal deoxynucleotidyl transferase
MHHHHHHGGSGHPEGNTPEKEVPSVIARHVSPYACQRKTTLNNYNKKITDALEIMAENYKFKENLQARLEARRAASVLKSLPFEVTSMKDIQGLPCITDDVRPVIEEIIEVGESSRVKEILNDERYKAFKQFTSVFGVGVKTAEKWYRMGLRTLEEVKASKFLKLNKMQKAGFLYYEDLASGVTKEEKDAVLDIVKETVWTVDPDALVTIVGGFRRGKPQGHDVDLLITIPGRPTDPELLHNVVDLLKKQGLLLYGDIRERTFVEGQLPNPKPDELDNHQKCFAILKLYRPKVDNSAVGTSKKVDMAEVKDWKAVRVDLVVAPDEQFAYAKLGWTGSGMFRRDTRRYAEEERDMLLDNHGLYDLKKGIFLSADSEEEIFGHLDLDYLEPWERNA

SEQ ID NO: 6337 - DNA, 1182 bp, synthetic construct
  misc_feature 1..1182: note = Variant of terminal deoxynucleotidyl transferase
  source 1..1182: mol_type = other DNA
atgcaccatcatcaccatcacgggggctccggccatccggaaggtaataccccggagaaggaggtgccgagcgttatcgcccgtcatgttagtccgtacgcgtgccagcgcaagaccacgctgaataactacaacaaaaagatcaccgacgcgctggagatcatggccgagaactacaagtttaaagagaacctgcaggcgcgcctggaggcccgtcgcgccgcgagtgtcctgaaaagcctgccgttcgaggttaccagcatgaaagacatccaaggtctgccgtgcattaccgacgacgtacgtcctgtgatcgaagagatcatcgaagtaggcgagagcagccgtgttaaagaaatcctcaatgacgagcgctacaaggcctttaagcagttcaccagcgtgttcggtgtgggcgtcaagaccgcggaaaagtggtaccgtctgggcctccgtacgctggaagaagtaaaggccagtaagttcctgaagctgaacaagatgcagaaggcgggcttcctgtactacgaggatctggcgagcggtgttacgaaagaagaaaaagatgccgttctggatatcgtgaaggaaacggtgtggactgttgatccggatgcgctggtgaccatcgtgggcggtttccgccgtggcaaacctcagggccacgacgttgacctgctgatcacgattccgggccgtcctacggatccggagctgctccacaacgtggttgatctgctcaagaagcaaggtctgctgctgtacggggacatccgtgagcgtacgttcgtggaggggcaactgccaaatcctaaacctgaccagctggacaatcatcagaagtgcttcgccattctcaagctgtaccgcccgaaggtggataacagtgcggttgggacgtcgaagaaagtcgacatggctgaggttaaggattggaaagcggttcgtgtggatctggtggtcgctccagatgagcagttcgcctatgcgaaactcggttggacgggcagcggcatgtttcgtcgcgatactcgtcgctacgcggaggaagagcgcgacatgctgctcgacaaccatggtctctacgacctgaaaaagggcatttttctgagtgcggacagcgaagaagagattttcggtcatctggacctggattatctggagccgtgggaacgcaacgcg

SEQ ID NO: 6338 - protein, 394 aa, synthetic construct
  REGION 1..394: note = Variant of terminal deoxynucleotidyl transferase
MHHHHHHGGSGHPEGNTPEKEVPSVIARHVSPYACQRKTTLNNYNKKITDALEIMAENYKFKENLQARLEARRAASVLKSLPFEVTSMKDIQGLPCITDDVRPVIEEIIEVGESSRVKEILNDERYKAFKQFTSVFGVGVKTAEKWYRLGLRTLEEVKASKFLKLNKMQKAGFLYYEDLASGVTKEEKDAVLDIVKETVWTVDPDALVTIVGGFRRGKPQGHDVDLLITIPGRPTDPELLHNVVDLLKKQGLLLYGDIRERTFVEGQLPNPKPDQLDNHQKCFAILKLYRPKVDNSAVGTSKKVDMAEVKDWKAVRVDLVVAPDEQFAYAKLGWTGSGMFRRDTRRYAEEERDMLLDNHGLYDLKKGIFLSADSEEEIFGHLDLDYLEPWERNA

SEQ ID NO: 6339 - DNA, 1182 bp, synthetic construct
  misc_feature 1..1182: note = Variant of terminal deoxynucleotidyl transferase
  source 1..1182: mol_type = other DNA
atgcaccatcatcaccatcacgggggctccggccatccggaaggtaataccccggagaaggaggtgccgagcgttatcgcccgtcatgttagtccgtacgcgtgccagcgcaagaccacgctgaataactacaacaaaaagatcaccgacgcgctggagatcatggccgagaactacaagtttaaagagaacctgcaggcgcgcctggaggcccgtcgcgccgcgagtgtcctgaaaagcctgccgttcgaggttaccagcatgaaagacatccaaggtctgccgtgcattaccgacgacgtacgtcctgtgatcgaagagatcatcgaagtaggcgagagcagccgtgttaaagaaatcctcaatgacgagcgctacaaggcctttaagcagttcaccagcgtgttcggtgtgggcgtcaagaccgcggaaaagtggtaccgtatgggcctccgtacgctggaagaagtaaaggccagtaagttcctgaagctgaacaagatgcagaaggcgggcttcctgtactacgaggatctggcgagcggtgttacgaaagaagaaaaagatgccgttctggatatcgtgaaggaaacggtgtggactgttgatccggatgcgctggtgaccatcgtgggcggtttccgccgtggcaaacctcagggccacgacgttgacctgctgatcacggtgccgggccgtcctacggatccggagctgctccacaacgtggttgatctgctcaagaagcaaggtctgctgctgtacggggacatccgtgagcgtacgttcgtggaggggcaactgccaaatcctaaacctgaccagctggacaatcatcagaagtgcttcgccattctcaagctgtaccgcccgaaggtggataacagtgcggttgggacgtcgaagaaagtcgacatggctgaggttaaggattggaaagcggttcgtgtggatctggtggtcgctccagatgagcagttcgcctatgcgaaactcggttggacgggcagcggcatgtttcgtcgcgatactcgtcgctacgcggaggaagagcgcgacatgctgctcgacaaccatggtctctacgacctgaaaaagggcatttttctgagtgcggacagcgaagaagagattttcggtcatctggacctggattatctggagccgtgggaacgcaacgcg

SEQ ID NO: 6340 - protein, 394 aa, synthetic construct
  REGION 1..394: note = Variant of terminal deoxynucleotidyl transferase
MHHHHHHGGSGHPEGNTPEKEVPSVIARHVSPYACQRKTTLNNYNKKITDALEIMAENYKFKENLQARLEARRAASVLKSLPFEVTSMKDIQGLPCITDDVRPVIEEIIEVGESSRVKEILNDERYKAFKQFTSVFGVGVKTAEKWYRMGLRTLEEVKASKFLKLNKMQKAGFLYYEDLASGVTKEEKDAVLDIVKETVWTVDPDALVTIVGGFRRGKPQGHDVDLLITVPGRPTDPELLHNVVDLLKKQGLLLYGDIRERTFVEGQLPNPKPDQLDNHQKCFAILKLYRPKVDNSAVGTSKKVDMAEVKDWKAVRVDLVVAPDEQFAYAKLGWTGSGMFRRDTRRYAEEERDMLLDNHGLYDLKKGIFLSADSEEEIFGHLDLDYLEPWERNA

SEQ ID NO: 6341 - DNA, 1182 bp, synthetic construct
  misc_feature 1..1182: note = Variant of terminal deoxynucleotidyl transferase
  source 1..1182: mol_type = other DNA
atgcaccatcatcaccatcacgggggctccggccatccggaaggtaataccccggagaaggaggtgccgagcgttatcgcccgtcatgttagtccgtacgcgtgccagcgcaagaccacgctgaataactacaacaaaaagatcaccgacgcgctggagatcatggccgagaactacaagtttaaagagaacctgcaggcgcgcctggaggcccgtcgcgccgcgagtgtcctgaaaagcctgccgttcgaggttaccagcatgaaagacatccaaggtctgccgtgcattaccgacgacgtacgtcctgtgatcgaagagatcatcgaagtaggcgagagcagccgtgttaaagaaatcctcaatgacgagcgctacaaggcctttaagcagttcaccagcgtgttcggtgtgggcgtcaagaccgcggaaaagtggtaccgtatgggcctccgtacgctggaagaagtaaaggccagtaagttcctgaagctgaacaagatgcagaaggcgggcttcctgtactacgaggatctggcgagcggtgttacgaaagaagaaaaagatgccgttctggatatcgtgaaggaaacggtgtggactgttgatccggatgcgctggtgaccatcgtgggcggtttccgccgtggcaaacctcagggccacgacgttgacctgctgatcacgattccgggccgtcctacggatccggagctgctccacaacgtggttgatctgctcaagaagcaaggtctgctgctgtacggggacatccgtgagcgtacgttcgtggaggggcaactgccaaatcctaaacctgaccagctggacaatcatcagaagtgcttcgccattctcaagctgtaccgtccgtatgtggataacagtgcggttgggacgtcgaagaaagtcgacatggctgaggttaaggattggaaagcggttcgtgtggatctggtggtcgctccagatgagcagttcgcctatgcgaaactcggttggacgggcagcggcatgtttcgtcgcgatactcgtcgctacgcggaggaagagcgcgacatgctgctcgacaaccatggtctctacgacctgaaaaagggcatttttctgagtgcggacagcgaagaagagattttcggtcatctggacctggattatctggagccgtgggaacgcaacgcg

SEQ ID NO: 6342 - protein, 394 aa, synthetic construct
  REGION 1..394: note = Variant of terminal deoxynucleotidyl transferase
MHHHHHHGGSGHPEGNTPEKEVPSVIARHVSPYACQRKTTLNNYNKKITDALEIMAENYKFKENLQARLEARRAASVLKSLPFEVTSMKDIQGLPCITDDVRPVIEEIIEVGESSRVKEILNDERYKAFKQFTSVFGVGVKTAEKWYRMGLRTLEEVKASKFLKLNKMQKAGFLYYEDLASGVTKEEKDAVLDIVKETVWTVDPDALVTIVGGFRRGKPQGHDVDLLITIPGRPTDPELLHNVVDLLKKQGLLLYGDIRERTFVEGQLPNPKPDQLDNHQKCFAILKLYRPYVDNSAVGTSKKVDMAEVKDWKAVRVDLVVAPDEQFAYAKLGWTGSGMFRRDTRRYAEEERDMLLDNHGLYDLKKGIFLSADSEEEIFGHLDLDYLEPWERNA

SEQ ID NO: 6343 - DNA, 1182 bp, synthetic construct
  misc_feature 1..1182: note = Variant of terminal deoxynucleotidyl transferase
  source 1..1182: mol_type = other DNA
atgcaccatcatcaccatcacgggggctccggccatccggaaggtaataccccggagaaggaggtgccgagcgttatcgcccgtcatgttagtccgtacgcgtgccagcgcaagaccacgctgaataactacaacaaaaagatcaccgacgcgctggagatcatggccgagaactacaagtttaaagagaacctgcaggcgcgcctggaggcccgtcgcgccgcgagtgtcctgaaaagcctgccgttcgaggttaccagcatgaaagacatccaaggtctgccgtgcattaccgacgacgtacgtcctgtgatcgaagagatcatcgaagtaggcgagagcagccgtgttaaagaaatcctcaatgacgagcgctacaaggcctttaagcagttcaccagcgtgttcggtgtgggcgtcaagaccgcggaaaagtggtaccgtatgggcctccgtacgctggaagaagtaaaggccagtaagttcctgaagctgaacaagatgcagaaggcgggcttcctgtactacgaggatctggcgagcggtgttacgaaagaagaaaaagatgccgttctggatatcgtgaaggaaacggtgtggactgttgatccggatgcgctggtgaccatcgtgggcggtttccgccgtggcaaacctcagggccacgacgttgacctgctgatcacgattccgggccgtcctacggatccggagctgctccacaacgtggttgatctgctcaagaagcaaggtctgctgctgtacggggacatccgtgagcgtacgttcgtggaggggcaactgccaaatcctaaacctgaccagctggacaatcatcagaagtgcttcgccattctcaagctgtaccgtccgggtgtggataacagtgcggttgggacgtcgaagaaagtcgacatggctgaggttaaggattggaaagcggttcgtgtggatctggtggtcgctccagatgagcagttcgcctatgcgaaactcggttggacgggcagcggcatgtttcgtcgcgatactcgtcgctacgcggaggaagagcgcgacatgctgctcgacaaccatggtctctacgacctgaaaaagggcatttttctgagtgcggacagcgaagaagagattttcggtcatctggacctggattatctggagccgtgggaacgcaacgcg

SEQ ID NO: 6344 - protein, 394 aa, synthetic construct
  REGION 1..394: note = Variant of terminal deoxynucleotidyl transferase
MHHHHHHGGSGHPEGNTPEKEVPSVIARHVSPYACQRKTTLNNYNKKITDALEIMAENYKFKENLQARLEARRAASVLKSLPFEVTSMKDIQGLPCITDDVRPVIEEIIEVGESSRVKEILNDERYKAFKQFTSVFGVGVKTAEKWYRMGLRTLEEVKASKFLKLNKMQKAGFLYYEDLASGVTKEEKDAVLDIVKETVWTVDPDALVTIVGGFRRGKPQGHDVDLLITIPGRPTDPELLHNVVDLLKKQGLLLYGDIRERTFVEGQLPNPKPDQLDNHQKCFAILKLYRPGVDNSAVGTSKKVDMAEVKDWKAVRVDLVVAPDEQFAYAKLGWTGSGMFRRDTRRYAEEERDMLLDNHGLYDLKKGIFLSADSEEEIFGHLDLDYLEPWERNA

SEQ ID NO: 6345 - DNA, 1182 bp, synthetic construct
  misc_feature 1..1182: note = Variant of terminal deoxynucleotidyl transferase
  source 1..1182: mol_type = other DNA
atgcaccatcatcaccatcacgggggctccggccatccggaaggtaataccccggagaaggaggtgccgagcgttatcgcccgtcatgttagtccgtacgcgtgccagcgcaagaccacgctgaataactacaacaaaaagatcaccgacgcgctggagatcatggccgagaactacaagtttaaagagaacctgcaggcgcgcctggaggcccgtcgcgccgcgagtgtcctgaaaagcctgccgttcgaggttaccagcatgaaagacatccaaggtctgccgtgcattaccgacgacgtacgtcctgtgatcgaagagatcatcgaagtaggcgagagcagccgtgttaaagaaatcctcaatgacgagcgctacaaggcctttaagcagttcaccagcgtgttcggtgtgggcgtcaagaccgcggaaaagtggtaccgtatgggcctccgtacgctggaagaagtaaaggccagtaagttcctgaagctgaacaagatgcagaaggcgggcttcctgtactacgaggatctggcgagcggtgttacgaaagaagaaaaagatgccgttctggatatcgtgaaggaaacggtgtggactgttgatccggatgcgctggtgaccatcgtgggcggtttccgccgtggcaaacctcagggccacgacgttgacctgctgatcacgattccgggccgtcctacggatccggagctgctccacaacgtggttgatctgctcaagaagcaaggtctgctgctgtacggggacatccgtgagcgtacgttcgtggaggggcaactgccaaatcctaaacctgaccagctggacaatcatcagaagtgcttcgccattctcaagctgtaccgcccgaaggtggataacagtgcggttgggacgtcgaagaaagtcgacatggctgaggttaaggattggaaagcggttcgtgtggatctggtggtcgctccagatgagcagttcgcctatgcgaaactcggttggacgggcagcggcatgtttcgtcgcgatactcgtcgctacgcggaggaagagcgcgacatgctgctcgacaaccatggtctctacgacctgaaaaagggcatctttctgagtgcgaggagcgaagaagagattttcggtcatctggacctggattatctggagccgtgggaacgcaacgcg

SEQ ID NO: 6346 - protein, 394 aa, synthetic construct
  REGION 1..394: note = Variant of terminal deoxynucleotidyl transferase
MHHHHHHGGSGHPEGNTPEKEVPSVIARHVSPYACQRKTTLNNYNKKITDALEIMAENYKFKENLQARLEARRAASVLKSLPFEVTSMKDIQGLPCITDDVRPVIEEIIEVGESSRVKEILNDERYKAFKQFTSVFGVGVKTAEKWYRMGLRTLEEVKASKFLKLNKMQKAGFLYYEDLASGVTKEEKDAVLDIVKETVWTVDPDALVTIVGGFRRGKPQGHDVDLLITIPGRPTDPELLHNVVDLLKKQGLLLYGDIRERTFVEGQLPNPKPDQLDNHQKCFAILKLYRPKVDNSAVGTSKKVDMAEVKDWKAVRVDLVVAPDEQFAYAKLGWTGSGMFRRDTRRYAEEERDMLLDNHGLYDLKKGIFLSARSEEEIFGHLDLDYLEPWERNA

SEQ ID NO: 6347 - DNA, 1182 bp, synthetic construct
  misc_feature 1..1182: note = Variant of terminal deoxynucleotidyl transferase
  source 1..1182: mol_type = other DNA
atgcaccatcatcaccatcacgggggctccggccatccggaaggtaataccccggagaaggaggtgccgagcgttatcgcccgtcatgttagtccgtacgcgtgccagcgcaagaccacgctgaataactacaacaaaaagatcaccgacgcgctggagatcatggccgagaactacaagtttaaagagaacctgcaggcgcgcctggaggcccgtcgcgccgcgagtgtcctgaaaagcctgccgttcgaggttaccagcatgaaagacatccaaggtctgccgtgcattaccgacgacgtacgtcctgtgatcgaagagatcatcgaagtaggcgagagcagccgtgttaaagaaatcctcaatgacgagcgctacaaggcctttaagcagttcaccagcgtgttcggtgtgggcgtcaagaccgcggaaaagtggtaccgtatgggcctccgtacgctggaagaagtaaaggccagtaagttcctgaagctgaacaagatgcagaaggcgggcttcctgtactacgaggatctggcgagcggtgttacgaaagaagaaaaagatgccgttctggatatcgtgaaggaaacggtgtggactgttgatccggatgcgctggtgaccatcgtgggcggtttccgccgtggcaaacctcagggccacgacgttgacctgctgatcacgattccgggccgtcctacggatccggagctgctccacaacgtggttgatctgctcaagaagcaaggtctgctgctgtacggggacatccgtgagcgtacgttcgtggaggggcaactgccaaatcctaaacctgaccagctggacaatcatcagaagtgcttcgccattctcaagctgtaccgcccgaaggtggataacagtgcggttgggacgtcgaagaaagtcgacatggctgaggttaaggattggaaagcggttcgtgtggatctggtggtcgctccagatgagcagttcgcctatgcgaaactcggttggacgggcagcggcatgtttcgtcgcgatactcgtcgctacgcggaggaagagcgcgacatgctgctcgacaaccatggtctctacgacctgaaaaagggcatctttctgacggcggacagcgaagaagagattttcggtcatctggacctggattatctggagccgtgggaacgcaacgcg

SEQ ID NO: 6348 - protein, 394 aa, synthetic construct
  REGION 1..394: note = Variant of terminal deoxynucleotidyl transferase
MHHHHHHGGSGHPEGNTPEKEVPSVIARHVSPYACQRKTTLNNYNKKITDALEIMAENYKFKENLQARLEARRAASVLKSLPFEVTSMKDIQGLPCITDDVRPVIEEIIEVGESSRVKEILNDERYKAFKQFTSVFGVGVKTAEKWYRMGLRTLEEVKASKFLKLNKMQKAGFLYYEDLASGVTKEEKDAVLDIVKETVWTVDPDALVTIVGGFRRGKPQGHDVDLLITIPGRPTDPELLHNVVDLLKKQGLLLYGDIRERTFVEGQLPNPKPDQLDNHQKCFAILKLYRPKVDNSAVGTSKKVDMAEVKDWKAVRVDLVVAPDEQFAYAKLGWTGSGMFRRDTRRYAEEERDMLLDNHGLYDLKKGIFLTADSEEEIFGHLDLDYLEPWERNA

SEQ ID NO: 6349 - DNA, 1182 bp, synthetic construct
  misc_feature 1..1182: note = Variant of terminal deoxynucleotidyl transferase
  source 1..1182: mol_type = other DNA
atgcaccatcatcaccatcacgggggctccggccatccggaaggtaataccccggagaaggaggtgccgagcgttatcgcccgtcatgttagtccgtacgcgtgccagcgcaagaccacgctgaataactacaacaaaaagatcaccgacgcgctggaaatcatggccgagaactggaagtttaaagagaacctgcaggcgcgcctggaggcccgtcgcgccgcgagtgtcctgaaaagcctgccgttcgaggttaccagcatgaaagacatccaaggtctgccgtgcattaccgacgacgtacgtcctgtgatcgaagagatcatcgaagtaggcgagagcagccgtgttaaagaaatcctcaatgacgagcgctacaaggcctttaagcagttcaccagcgtgttcggtgtgggcgtcaagaccgcggaaaagtggtaccgtatgggcctccgtacgctggaagaagtaaaggccagtaagttcctgaagctgaacaagatgcagaaggcgggcttcctgtactacgaggatctggcgagcggtgttacgaaagaagaaaaagatgccgttctggatatcgtgaaggaaacggtgtggactgttgatccggatgcgctggtgaccatcgtgggcggtttccgccgtggcaaacctcagggccacgacgttgacctgctgatcacgattccgggccgtcctacggatccggagctgctccacaacgtggttgatctgctcaagaagcaaggtctgctgctgtacggggacatccgtgagcgtacgttcgtggaggggcaactgccaaatcctaaacctgaccagctggacaatcatcagaagtgcttcgccattctcaagctgtaccgcccgaaggtggataacagtgcggttgggacgtcgaagaaagtcgacatggctgaggttaaggattggaaagcggttcgtgtggatctggtggtcgctccagatgagcagttcgcctatgcgaaactcggttggacgggcagcggcatgtttcgtcgcgatactcgtcgctacgcggaggaagagcgcgacatgctgctcgacaaccatggtctctacgacctgaaaaagggcatttttctgagtgcggacagcgaagaagagattttcggtcatctggacctggattatctggagccgtgggaacgcaacgcg

SEQ ID NO: 6350 - protein, 394 aa, synthetic construct
  REGION 1..394: note = Variant of terminal deoxynucleotidyl transferase
MHHHHHHGGSGHPEGNTPEKEVPSVIARHVSPYACQRKTTLNNYNKKITDALEIMAENWKFKENLQARLEARRAASVLKSLPFEVTSMKDIQGLPCITDDVRPVIEEIIEVGESSRVKEILNDERYKAFKQFTSVFGVGVKTAEKWYRMGLRTLEEVKASKFLKLNKMQKAGFLYYEDLASGVTKEEKDAVLDIVKETVWTVDPDALVTIVGGFRRGKPQGHDVDLLITIPGRPTDPELLHNVVDLLKKQGLLLYGDIRERTFVEGQLPNPKPDQLDNHQKCFAILKLYRPKVDNSAVGTSKKVDMAEVKDWKAVRVDLVVAPDEQFAYAKLGWTGSGMFRRDTRRYAEEERDMLLDNHGLYDLKKGIFLSADSEEEIFGHLDLDYLEPWERNA

SEQ ID NO: 6351 - DNA, 1182 bp, synthetic construct
  misc_feature 1..1182: note = Variant of terminal deoxynucleotidyl transferase
  source 1..1182: mol_type = other DNA
atgcaccatcatcaccatcacgggggctccggccatccggaaggtaataccccggagaaggaggtgccgagcgttatcgcccgtcatgttagtccgtacgcgtgccagcgcaagaccacgctgaataactacaacaaaaagatcaccgacgcgctggagatcatggccgagaactacaagtttaaagagaacctgcaggcgcgcctggaggcccgtcgcgccgcgagtgtcctgaaaagcctgccgttcgaggttaccagcatgaaagacatccaaggtctgccgtgcattaccgacgacgtacgtcctgtgatcgaagagatcatcgaagtaggcgagagcagccgtgttaaagaaatcctcaatgacgagcgctacaaggcctttaagcagttcaccagcgtgttcggtgtgggcgtcaagaccgcggaaaagtggtaccgtgagggcctccgtacgctggaagaagtaaaggccagtaagttcctgaagctgaacaagatgcagaaggcgggcttcctgtactacgaggatctggcgagcggtgttacgaaagaagaaaaagatgccgttctggatatcgtgaaggaaacggtgtggactgttgatccggatgcgctggtgaccatcgtgggcggtttccgccgtggcaaacctcagggccacgacgttgacctgctgatcacgattccgggccgtcctacggatccggagctgctccacaacgtggttgatctgctcaagaagcaaggtctgctgctgtacggggacatccgtgagcgtacgttcgtggaggggcaactgccaaatcctaaacctgaccagctggacaatcatcagaagtgcttcgccattctcaagctgtaccgcccgaaggtggataacagtgcggttgggacgtcgaagaaagtcgacatggctgaggttaaggattggaaagcggttcgtgtggatctggtggtcgctccagatgagcagttcgcctatgcgaaactcggttggacgggcagcggcatgtttcgtcgcgatactcgtcgctacgcggaggaagagcgcgacatgctgctcgacaaccatggtctctacgacctgaaaaagggcatttttctgagtgcggacagcgaagaagagattttcggtcatctggacctggattatctggagccgtgggaacgcaacgcg

SEQ ID NO: 6352 - protein, 394 aa, synthetic construct
  REGION 1..394: note = Variant of terminal deoxynucleotidyl transferase
MHHHHHHGGSGHPEGNTPEKEVPSVIARHVSPYACQRKTTLNNYNKKITDALEIMAENYKFKENLQARLEARRAASVLKSLPFEVTSMKDIQGLPCITDDVRPVIEEIIEVGESSRVKEILNDERYKAFKQFTSVFGVGVKTAEKWYREGLRTLEEVKASKFLKLNKMQKAGFLYYEDLASGVTKEEKDAVLDIVKETVWTVDPDALVTIVGGFRRGKPQGHDVDLLITIPGRPTDPELLHNVVDLLKKQGLLLYGDIRERTFVEGQLPNPKPDQLDNHQKCFAILKLYRPKVDNSAVGTSKKVDMAEVKDWKAVRVDLVVAPDEQFAYAKLGWTGSGMFRRDTRRYAEEERDMLLDNHGLYDLKKGIFLSADSEEEIFGHLDLDYLEPWERNA

SEQ ID NO: 6353 - DNA, 1182 bp, synthetic construct
  misc_feature 1..1182: note = Variant of terminal deoxynucleotidyl transferase
  source 1..1182: mol_type = other DNA
atgcaccatcatcaccatcacgggggctccggccatccggaaggtaataccccggagaaggaggtgccgagcgttatcgcccgtcatgttagtccgtacgcgtgccagcgcaagaccacgctgaataactacaacaaaaagatcaccgacgcgctggagatcatggccgagaactacaagtttaaagagaacctgcaggcgcgcctggaggcccgtcgcgccgcgagtgtcctgaaaagcctgccgttcgaggttaccagcatgaaagacatccaaggtctgccgtgcattaccgacgacgtacgtcctgtgatcgaagagatcatcgaagtaggcgagagcagccgtgttaaagaaatcctcaatgacgagcgctacaaggcctttaagcagttcaccagcgtgttcggtgtgggcgtcaagaccgcggaaaagtggtaccgtatgggcctccgtacgctggaagaagtaaaggccagtaagttcctgaagctgaacaagatgcagaaggcgggcttcctgtactacgaggatctggcgagcggtgttacgaaagaagaaaaagatgccgttctggatatcgtgaaggaaacggtgtggactgttgatccggatgcgctggtgaccatcgtgggcggtttccgccgtggcaaacctcagggccacgacgttgacctgctgatcacgattccgggccgtcctacggatccggagctgctccacaacgtggttgatctgctcaagaagcaaggtctgctgctgtacggggacatccgtgagcgtacgttcgtggaggggcaactgccaaatcctaaacctgaccagctggacaatcatcagaagtgcttcgccattctcaagctgtaccgcccgaaggtggataacagtgcggttgggacgtcgaagaaagtcgacatggctgaggttaaggattggaaagcggttcgtgtggatctggtggtcgctccagatgagcagttcgcctatgcgaaactcggttggacgggcagcggcgagtttcgtcgcgatactcgtcgctacgcggaggaagagcgcgacatgctgctcgacaaccatggtctctacgacctgaaaaagggcatttttctgagtgcggacagcgaagaagagattttcggtcatctggacctggattatctggagccgtgggaacgcaacgcg

SEQ ID NO: 6354 - protein, 394 aa, synthetic construct
  REGION 1..394: note = Variant of terminal deoxynucleotidyl transferase
MHHHHHHGGSGHPEGNTPEKEVPSVIARHVSPYACQRKTTLNNYNKKITDALEIMAENYKFKENLQARLEARRAASVLKSLPFEVTSMKDIQGLPCITDDVRPVIEEIIEVGESSRVKEILNDERYKAFKQFTSVFGVGVKTAEKWYRMGLRTLEEVKASKFLKLNKMQKAGFLYYEDLASGVTKEEKDAVLDIVKETVWTVDPDALVTIVGGFRRGKPQGHDVDLLITIPGRPTDPELLHNVVDLLKKQGLLLYGDIRERTFVEGQLPNPKPDQLDNHQKCFAILKLYRPKVDNSAVGTSKKVDMAEVKDWKAVRVDLVVAPDEQFAYAKLGWTGSGEFRRDTRRYAEEERDMLLDNHGLYDLKKGIFLSADSEEEIFGHLDLDYLEPWERNA

SEQ ID NO: 6355 - DNA, 1182 bp, synthetic construct
  misc_feature 1..1182: note = Variant of terminal deoxynucleotidyl transferase
  source 1..1182: mol_type = other DNA
atgcaccatcatcaccatcacgggggctccggccatccggaaggtaataccccggagaaggaggtgccgagcgttatcgcccgtcatgttagtccgtacgcgtgccagcgcaagaccacgctgaataactacaacaaaaagatcaccgacgcgctggagatcatggccgagaactacaagtttaaagagaacctgcaggcgcgcctggaggcccgtcgcgccgcgagtgtcctgaaaagcctgccgttcgaggttaccagcatgaaagacatccaaggtctgccgtgcattaccgacgacgtacgtcctgtgatcgaagagatcatcgaagtaggcgagagcagccgtgttaaagaaatcctcaatgacgagcgctacaaggcctttaagcagttcaccagcgtgttcggtgtgggcgtcaagaccgcggaaaagtggtaccgtatgggcatgcgtacgctggaagaagtaaaggccagtaagttcctgaagctgaacaagatgcagaaggcgggcttcctgtactacgaggatctggcgagcggtgttacgaaagaagaaaaagatgccgttctggatatcgtgaaggaaacggtgtggactgttgatccggatgcgctggtgaccatcgtgggcggtttccgccgtggcaaacctcagggccacgacgttgacctgctgatcacgattccgggccgtcctacggatccggagctgctccacaacgtggttgatctgctcaagaagcaaggtctgctgctgtacggggacatccgtgagcgtacgttcgtggaggggcaactgccaaatcctaaacctgaccagctggacaatcatcagaagtgcttcgccattctcaagctgtaccgcccgaaggtggataacagtgcggttgggacgtcgaagaaagtcgacatggctgaggttaaggattggaaagcggttcgtgtggatctggtggtcgctccagatgagcagttcgcctatgcgaaactcggttggacgggcagcggcatgtttcgtcgcgatactcgtcgctacgcggaggaagagcgcgacatgctgctcgacaaccatggtctctacgacctgaaaaagggcatttttctgagtgcggacagcgaagaagagattttcggtcatctggacctggattatctggagccgtgggaacgcaacgcg

SEQ ID NO: 6356 - protein, 394 aa, synthetic construct
  REGION 1..394: note = Variant of terminal deoxynucleotidyl transferase
MHHHHHHGGSGHPEGNTPEKEVPSVIARHVSPYACQRKTTLNNYNKKITDALEIMAENYKFKENLQARLEARRAASVLKSLPFEVTSMKDIQGLPCITDDVRPVIEEIIEVGESSRVKEILNDERYKAFKQFTSVFGVGVKTAEKWYRMGMRTLEEVKASKFLKLNKMQKAGFLYYEDLASGVTKEEKDAVLDIVKETVWTVDPDALVTIVGGFRRGKPQGHDVDLLITIPGRPTDPELLHNVVDLLKKQGLLLYGDIRERTFVEGQLPNPKPDQLDNHQKCFAILKLYRPKVDNSAVGTSKKVDMAEVKDWKAVRVDLVVAPDEQFAYAKLGWTGSGMFRRDTRRYAEEERDMLLDNHGLYDLKKGIFLSADSEEEIFGHLDLDYLEPWERNA

SEQ ID NO: 6357 - DNA, 1182 bp, synthetic construct
  misc_feature 1..1182: note = Variant of terminal deoxynucleotidyl transferase
  source 1..1182: mol_type = other DNA
atgcaccatcatcaccatcacgggggctccggccatccggaaggtaataccccggagaaggaggtgccgagcgttatcgcccgtcatgttagtccgtacgcgtgccagcgcaagaccacgctgaataactacaacaaaaagatcaccgacgcgctggagatcatggccgagaactacaagatgaaagagaacctgcaggcgcgcctggaggcccgtcgcgccgcgagtgtcctgaaaagcctgccgttcgaggttaccagcatgaaagacatccaaggtctgccgtgcattaccgacgacgtacgtcctgtgatcgaagagatcatcgaagtaggcgagagcagccgtgttaaagaaatcctcaatgacgagcgctacaaggcctttaagcagttcaccagcgtgttcggtgtgggcgtcaagaccgcggaaaagtggtaccgtatgggcctccgtacgctggaagaagtaaaggccagtaagttcctgaagctgaacaagatgcagaaggcgggcttcctgtactacgaggatctggcgagcggtgttacgaaagaagaaaaagatgccgttctggatatcgtgaaggaaacggtgtggactgttgatccggatgcgctggtgaccatcgtgggcggtttccgccgtggcaaacctcagggccacgacgttgacctgctgatcacgattccgggccgtcctacggatccggagctgctccacaacgtggttgatctgctcaagaagcaaggtctgctgctgtacggggacatccgtgagcgtacgttcgtggaggggcaactgccaaatcctaaacctgaccagctggacaatcatcagaagtgcttcgccattctcaagctgtaccgcccgaaggtggataacagtgcggttgggacgtcgaagaaagtcgacatggctgaggttaaggattggaaagcggttcgtgtggatctggtggtcgctccagatgagcagttcgcctatgcgaaactcggttggacgggcagcggcatgtttcgtcgcgatactcgtcgctacgcggaggaagagcgcgacatgctgctcgacaaccatggtctctacgacctgaaaaagggcatttttctgagtgcggacagcgaagaagagattttcggtcatctggacctggattatctggagccgtgggaacgcaacgcg

SEQ ID NO: 6358 - protein, 394 aa, synthetic construct
  REGION 1..394: note = Variant of terminal deoxynucleotidyl transferase
MHHHHHHGGSGHPEGNTPEKEVPSVIARHVSPYACQRKTTLNNYNKKITDALEIMAENYKMKENLQARLEARRAASVLKSLPFEVTSMKDIQGLPCITDDVRPVIEEIIEVGESSRVKEILNDERYKAFKQFTSVFGVGVKTAEKWYRMGLRTLEEVKASKFLKLNKMQKAGFLYYEDLASGVTKEEKDAVLDIVKETVWTVDPDALVTIVGGFRRGKPQGHDVDLLITIPGRPTDPELLHNVVDLLKKQGLLLYGDIRERTFVEGQLPNPKPDQLDNHQKCFAILKLYRPKVDNSAVGTSKKVDMAEVKDWKAVRVDLVVAPDEQFAYAKLGWTGSGMFRRDTRRYAEEERDMLLDNHGLYDLKKGIFLSADSEEEIFGHLDLDYLEPWERNA

SEQ ID NO: 6359 - DNA, 1182 bp, synthetic construct
  misc_feature 1..1182: note = Variant of terminal deoxynucleotidyl transferase
  source 1..1182: mol_type = other DNA
atgcaccatcatcaccatcacgggggctccggccatccggaaggtaataccccggagaaggaggtgccgagcgttatcgcccgtcatgttagtccgtacgcgtgccagcgcaagaccacgctgaataactacaacaaaaagatcaccgacgcgctggagatcatggccgagaactacaagtttaaagagaacctgcaggcgcgcctggaggcccgtcgcgccgcgagtgtcctgaaaagcctgccgttcgaggttaccagcatgaaagacatccaaggtctgccgtgcattaccgacgacgtacgtcctgtgatcgaagagatcatcgaagtaggcgagagcagccgtgttaaagaaatcctcaatgacgagcgctacaaggcctttaagcagttcaccagcgtgttcggtgtgggcgtcaagaccgcggaaaagtggtaccgtatgggcctccgtacgctggaagaagtaaagactagtaagttcctgaagctgaacaagatgcagaaggcgggcttcctgtactacgaggatctggcgagcggtgttacgaaagaagaaaaagatgccgttctggatatcgtgaaggaaacggtgtggactgttgatccggatgcgctggtgaccatcgtgggcggtttccgccgtggcaaacctcagggccacgacgttgacctgctgatcacgattccgggccgtcctacggatccggagctgctccacaacgtggttgatctgctcaagaagcaaggtctgctgctgtacggggacatccgtgagcgtacgttcgtggaggggcaactgccaaatcctaaacctgaccagctggacaatcatcagaagtgcttcgccattctcaagctgtaccgcccgaaggtggataacagtgcggttgggacgtcgaagaaagtcgacatggctgaggttaaggattggaaagcggttcgtgtggatctggtggtcgctccagatgagcagttcgcctatgcgaaactcggttggacgggcagcggcatgtttcgtcgcgatactcgtcgctacgcggaggaagagcgcgacatgctgctcgacaaccatggtctctacgacctgaaaaagggcatttttctgagtgcggacagcgaagaagagattttcggtcatctggacctggattatctggagccgtgggaacgcaacgcg

SEQ ID NO: 6360 - protein, 394 aa, synthetic construct
  REGION 1..394: note = Variant of terminal deoxynucleotidyl transferase
MHHHHHHGGSGHPEGNTPEKEVPSVIARHVSPYACQRKTTLNNYNKKITDALEIMAENYKFKENLQARLEARRAASVLKSLPFEVTSMKDIQGLPCITDDVRPVIEEIIEVGESSRVKEILNDERYKAFKQFTSVFGVGVKTAEKWYRMGLRTLEEVKTSKFLKLNKMQKAGFLYYEDLASGVTKEEKDAVLDIVKETVWTVDPDALVTIVGGFRRGKPQGHDVDLLITIPGRPTDPELLHNVVDLLKKQGLLLYGDIRERTFVEGQLPNPKPDQLDNHQKCFAILKLYRPKVDNSAVGTSKKVDMAEVKDWKAVRVDLVVAPDEQFAYAKLGWTGSGMFRRDTRRYAEEERDMLLDNHGLYDLKKGIFLSADSEEEIFGHLDLDYLEPWERNA

SEQ ID NO: 6361 - DNA, 1182 bp, synthetic construct
  misc_feature 1..1182: note = Variant of terminal deoxynucleotidyl transferase
  source 1..1182: mol_type = other DNA
atgcaccatcatcaccatcacgggggctccggccatccggaaggtaataccccggagaaggaggtgccgagcgttatcgcccgtcatgttagtccgtacgcgtgccagcgcaagaccacgctgaataactacaacaaaaagatcaccgacgcgctggagatcatggccgagaactacaagtttaaagagaacctgcaggcgcgcctggaggcccgtcgcgccgcgagtgtcctgaaaagcctgccgttcgaggttaccagcatgaaagacatccaaggtctgccgtgcattaccgacgacgtacgtcctgtgatcgaagagatcatcgaagtaggcgagagcagccgtgttaaagaaatcctcaatgacgagcgctacaaggcctttaagcagttcaccagcgtgttcggtgtgggcctgaagaccgcggaaaagtggtaccgtatgggcctccgtacgctggaagaagtaaaggccagtaagttcctgaagctgaacaagatgcagaaggcgggcttcctgtactacgaggatctggcgagcggtgttacgaaagaagaaaaagatgccgttctggatatcgtgaaggaaacggtgtggactgttgatccggatgcgctggtgaccatcgtgggcggtttccgccgtggcaaacctcagggccacgacgttgacctgctgatcacgattccgggccgtcctacggatccggagctgctccacaacgtggttgatctgctcaagaagcaaggtctgctgctgtacggggacatccgtgagcgtacgttcgtggaggggcaactgccaaatcctaaacctgaccagctggacaatcatcagaagtgcttcgccattctcaagctgtaccgcccgaaggtggataacagtgcggttgggacgtcgaagaaagtcgacatggctgaggttaaggattggaaagcggttcgtgtggatctggtggtcgctccagatgagcagttcgcctatgcgaaactcggttggacgggcagcggcatgtttcgtcgcgatactcgtcgctacgcggaggaagagcgcgacatgctgctcgacaaccatggtctctacgacctgaaaaagggcatttttctgagtgcggacagcgaagaagagattttcggtcatctggacctggattatctggagccgtgggaacgcaacgcg

SEQ ID NO: 6362 - protein, 394 aa, synthetic construct
  REGION 1..394: note = Variant of terminal deoxynucleotidyl transferase
MHHHHHHGGSGHPEGNTPEKEVPSVIARHVSPYACQRKTTLNNYNKKITDALEIMAENYKFKENLQARLEARRAASVLKSLPFEVTSMKDIQGLPCITDDVRPVIEEIIEVGESSRVKEILNDERYKAFKQFTSVFGVGLKTAEKWYRMGLRTLEEVKASKFLKLNKMQKAGFLYYEDLASGVTKEEKDAVLDIVKETVWTVDPDALVTIVGGFRRGKPQGHDVDLLITIPGRPTDPELLHNVVDLLKKQGLLLYGDIRERTFVEGQLPNPKPDQLDNHQKCFAILKLYRPKVDNSAVGTSKKVDMAEVKDWKAVRVDLVVAPDEQFAYAKLGWTGSGMFRRDTRRYAEEERDMLLDNHGLYDLKKGIFLSADSEEEIFGHLDLDYLEPWERNA

SEQ ID NO: 6363 - DNA, 1182 bp, synthetic construct
  misc_feature 1..1182: note = Variant of terminal deoxynucleotidyl transferase
  source 1..1182: mol_type = other DNA
atgcaccatcatcaccatcacgggggctccggccatccggaaggtaataccccggagaaggaggtgccgagcgttatcgcccgtcatgttagtccgtacgcgtgccagcgcaagaccacgctgaataactacaacaaaaagatcaccgacgcgctggaaatcatggccgagaacttgaagtttaaagagaacctgcaggcgcgcctggaggcccgtcgcgccgcgagtgtcctgaaaagcctgccgttcgaggttaccagcatgaaagacatccaaggtctgccgtgcattaccgacgacgtacgtcctgtgatcgaagagatcatcgaagtaggcgagagcagccgtgttaaagaaatcctcaatgacgagcgctacaaggcctttaagcagttcaccagcgtgttcggtgtgggcgtcaagaccgcggaaaagtggtaccgtatgggcctccgtacgctggaagaagtaaaggccagtaagttcctgaagctgaacaagatgcagaaggcgggcttcctgtactacgaggatctggcgagcggtgttacgaaagaagaaaaagatgccgttctggatatcgtgaaggaaacggtgtggactgttgatccggatgcgctggtgaccatcgtgggcggtttccgccgtggcaaacctcagggccacgacgttgacctgctgatcacgattccgggccgtcctacggatccggagctgctccacaacgtggttgatctgctcaagaagcaaggtctgctgctgtacggggacatccgtgagcgtacgttcgtggaggggcaactgccaaatcctaaacctgaccagctggacaatcatcagaagtgcttcgccattctcaagctgtaccgcccgaaggtggataacagtgcggttgggacgtcgaagaaagtcgacatggctgaggttaaggattggaaagcggttcgtgtggatctggtggtcgctccagatgagcagttcgcctatgcgaaactcggttggacgggcagcggcatgtttcgtcgcgatactcgtcgctacgcggaggaagagcgcgacatgctgctcgacaaccatggtctctacgacctgaaaaagggcatttttctgagtgcggacagcgaagaagagattttcggtcatctggacctggattatctggagccgtgggaacgcaacgcg

SEQ ID NO: 6364 - protein, 394 aa, synthetic construct
  REGION 1..394: note = Variant of terminal deoxynucleotidyl transferase
MHHHHHHGGSGHPEGNTPEKEVPSVIARHVSPYACQRKTTLNNYNKKITDALEIMAENLKFKENLQARLEARRAASVLKSLPFEVTSMKDIQGLPCITDDVRPVIEEIIEVGESSRVKEILNDERYKAFKQFTSVFGVGVKTAEKWYRMGLRTLEEVKASKFLKLNKMQKAGFLYYEDLASGVTKEEKDAVLDIVKETVWTVDPDALVTIVGGFRRGKPQGHDVDLLITIPGRPTDPELLHNVVDLLKKQGLLLYGDIRERTFVEGQLPNPKPDQLDNHQKCFAILKLYRPKVDNSAVGTSKKVDMAEVKDWKAVRVDLVVAPDEQFAYAKLGWTGSGMFRRDTRRYAEEERDMLLDNHGLYDLKKGIFLSADSEEEIFGHLDLDYLEPWERNA

SEQ ID NO: 6365 - DNA, 1182 bp, synthetic construct
  misc_feature 1..1182: note = Variant of terminal deoxynucleotidyl transferase
  source 1..1182: mol_type = other DNA
atgcaccatcatcaccatcacgggggctccggccatccggaaggtaataccccggagaaggaggtgccgagcgttatcgcccgtcatgttagtccgtacgcgtgccagcgcaagaccacgctgaataactacaacaaaaagatcaccgacgcgctggagatcatggccgagaactacaagtttaaagagaacctgcaggcgcgcctggaggcccgtcgcgccgcgagtgtcctgaaaagcctgccgttcgaggttaccagcatgaaagacatccaaggtctgccgtgcattaccgacgacgtacgtcctgtgatcgaagagatcatcgaagtaggcgagagcagccgtgttaaagaaatcctcaatgacgagcgctacaagagttttaagcagttcaccagcgtgttcggtgtgggcgtcaagaccgcggaaaagtggtaccgtatgggcctccgtacgctggaagaagtaaaggccagtaagttcctgaagctgaacaagatgcagaaggcgggcttcctgtactacgaggatctggcgagcggtgttacgaaagaagaaaaagatgccgttctggatatcgtgaaggaaacggtgtggactgttgatccggatgcgctggtgaccatcgtgggcggtttccgccgtggcaaacctcagggccacgacgttgacctgctgatcacgattccgggccgtcctacggatccggagctgctccacaacgtggttgatctgctcaagaagcaaggtctgctgctgtacggggacatccgtgagcgtacgttcgtggaggggcaactgccaaatcctaaacctgaccagctggacaatcatcagaagtgcttcgccattctcaagctgtaccgcccgaaggtggataacagtgcggttgggacgtcgaagaaagtcgacatggctgaggttaaggattggaaagcggttcgtgtggatctggtggtcgctccagatgagcagttcgcctatgcgaaactcggttggacgggcagcggcatgtttcgtcgcgatactcgtcgctacgcggaggaagagcgcgacatgctgctcgacaaccatggtctctacgacctgaaaaagggcatttttctgagtgcggacagcgaagaagagattttcggtcatctggacctggattatctggagccgtgggaacgcaacgcg

SEQ ID NO: 6366 - protein, 394 aa, synthetic construct
  REGION 1..394: note = Variant of terminal deoxynucleotidyl transferase
MHHHHHHGGSGHPEGNTPEKEVPSVIARHVSPYACQRKTTLNNYNKKITDALEIMAENYKFKENLQARLEARRAASVLKSLPFEVTSMKDIQGLPCITDDVRPVIEEIIEVGESSRVKEILNDERYKSFKQFTSVFGVGVKTAEKWYRMGLRTLEEVKASKFLKLNKMQKAGFLYYEDLASGVTKEEKDAVLDIVKETVWTVDPDALVTIVGGFRRGKPQGHDVDLLITIPGRPTDPELLHNVVDLLKKQGLLLYGDIRERTFVEGQLPNPKPDQLDNHQKCFAILKLYRPKVDNSAVGTSKKVDMAEVKDWKAVRVDLVVAPDEQFAYAKLGWTGSGMFRRDTRRYAEEERDMLLDNHGLYDLKKGIFLSADSEEEIFGHLDLDYLEPWERNA

SEQ ID NO: 6367 - DNA, 1182 bp, synthetic construct
  misc_feature 1..1182: note = Variant of terminal deoxynucleotidyl transferase
  source 1..1182: mol_type = other DNA
atgcaccatcatcaccatcacgggggctccggccatccggaaggtaataccccggagaaggaggtgccgagcgttatcgcccgtcatgttagtccgtacgcgtgccagcgcaagaccacgctgaataactacaacaaaaagatcaccgacgcgctggagatcatggccgagaactacaagtttaaagagaacctgcaggcgcgcctggaggcccgtcgcgccgcgagtgtcctgaaaagcctgccgttcgaggttaccagcatgaaagacatccaaggtctgccgtgcattaccgacgacgtacgtcctgtgatcgaagagatcatcgaagtaggcgagagcagccgtgttaaagaaatcctcaatgacgagcgctacaaggcctttaagcagttcaccagcgtgttcggtgtgggcgtcaagaccgcggaaaagtggtaccgtatgggcctccgtacgctggaagaagtaaaggccagtaagttcctgaagctgaacaagatgcagaaggcgggcttcctgtactacgaggatctggcgagcggtgttacgaaagaagaaaaagatgccgttctggatatcgtgaaggaaacggtgtggactgttgatccggatgcgctggtgaccatcgtgggcggtttccgccgtggcaaacctcagggccacgacgttgacctgctgatcacgattccgggccgtcctacggatccggagctgctccacaacgtggttgatctgctcaagaagcaaggtctgctgctgtacggggacatccgtgagcgtacgttcgtggaggggcaactgccaaatcctaaacctgaccagctggacaatcatcagaagtgcttcgccattctcaagctgtaccgtccgattgtggataacagtgcggttgggacgtcgaagaaagtcgacatggctgaggttaaggattggaaagcggttcgtgtggatctggtggtcgctccagatgagcagttcgcctatgcgaaactcggttggacgggcagcggcatgtttcgtcgcgatactcgtcgctacgcggaggaagagcgcgacatgctgctcgacaaccatggtctctacgacctgaaaaagggcatttttctgagtgcggacagcgaagaagagattttcggtcatctggacctggattatctggagccgtgggaacgcaacgcg

SEQ ID NO: 6368 - protein, 394 aa, synthetic construct
  REGION 1..394: note = Variant of terminal deoxynucleotidyl transferase
MHHHHHHGGSGHPEGNTPEKEVPSVIARHVSPYACQRKTTLNNYNKKITDALEIMAENYKFKENLQARLEARRAASVLKSLPFEVTSMKDIQGLPCITDDVRPVIEEIIEVGESSRVKEILNDERYKAFKQFTSVFGVGVKTAEKWYRMGLRTLEEVKASKFLKLNKMQKAGFLYYEDLASGVTKEEKDAVLDIVKETVWTVDPDALVTIVGGFRRGKPQGHDVDLLITIPGRPTDPELLHNVVDLLKKQGLLLYGDIRERTFVEGQLPNPKPDQLDNHQKCFAILKLYRPIVDNSAVGTSKKVDMAEVKDWKAVRVDLVVAPDEQFAYAKLGWTGSGMFRRDTRRYAEEERDMLLDNHGLYDLKKGIFLSADSEEEIFGHLDLDYLEPWERNA

SEQ ID NO: 6369 - DNA, 1182 bp, synthetic construct
  misc_feature 1..1182: note = Variant of terminal deoxynucleotidyl transferase
  source 1..1182: mol_type = other DNA
atgcaccatcatcaccatcacgggggctccggccatccggaaggtaataccccggagaaggaggtgccgagcgttatcgcccgtcatgttagtccgtacgcgtgccagcgcaagaccacgctgaataactacaacaaaaagatcaccgacgcgctggagatcatggccgagaactacaagtttaaagagaacctgcaggcgcgcctggaggcccgtcgcgccgcgagtgtcctgaaaagcctgccgttcgaggttaccagcatgaaagacatccaaggtctgccgtgcattaccgacgacgtacgtcctgtgatcgaagagatcatcgaagtaggcgagagcagccgtgttaaagaaatcctcaatgacgagcgctacaaggcctttaagcagttcaccagcgtgttcggtgtgggcgtcaagaccgcggaaaagtggtaccgtatgggcctccgtacgctggaagaagtaaaggccagtaagttcctgaagctgaacaagatgcagaaggcgggcttcctgtactacgaggatctggcgagcggtgttacgaaagaagaaaaagatgccgttctggatatcgtgaaggaaacggtgtggactgttgatccggatgcgctggtgaccatcgtgggcggtttccgccgtggcaaacctcagggccacgacgttgacctgctgatcacgtgtccgggccgtcctacggatccggagctgctccacaacgtggttgatctgctcaagaagcaaggtctgctgctgtacggggacatccgtgagcgtacgttcgtggaggggcaactgccaaatcctaaacctgaccagctggacaatcatcagaagtgcttcgccattctcaagctgtaccgcccgaaggtggataacagtgcggttgggacgtcgaagaaagtcgacatggctgaggttaaggattggaaagcggttcgtgtggatctggtggtcgctccagatgagcagttcgcctatgcgaaactcggttggacgggcagcggcatgtttcgtcgcgatactcgtcgctacgcggaggaagagcgcgacatgctgctcgacaaccatggtctctacgacctgaaaaagggcatttttctgagtgcggacagcgaagaagagattttcggtcatctggacctggattatctggagccgtgggaacgcaacgcg

SEQ ID NO: 6370 - protein, 394 aa, synthetic construct
  REGION 1..394: note = Variant of terminal deoxynucleotidyl transferase
MHHHHHHGGSGHPEGNTPEKEVPSVIARHVSPYACQRKTTLNNYNKKITDALEIMAENYKFKENLQARLEARRAASVLKSLPFEVTSMKDIQGLPCITDDVRPVIEEIIEVGESSRVKEILNDERYKAFKQFTSVFGVGVKTAEKWYRMGLRTLEEVKASKFLKLNKMQKAGFLYYEDLASGVTKEEKDAVLDIVKETVWTVDPDALVTIVGGFRRGKPQGHDVDLLITCPGRPTDPELLHNVVDLLKKQGLLLYGDIRERTFVEGQLPNPKPDQLDNHQKCFAILKLYRPKVDNSAVGTSKKVDMAEVKDWKAVRVDLVVAPDEQFAYAKLGWTGSGMFRRDTRRYAEEERDMLLDNHGLYDLKKGIFLSADSEEEIFGHLDLDYLEPWERNA

SEQ ID NO: 6371 - DNA, 1182 bp, synthetic construct
  misc_feature 1..1182: note = Variant of terminal deoxynucleotidyl transferase
  source 1..1182: mol_type = other DNA
atgcaccatcatcaccatcacgggggctccggccatccggaaggtaataccccggagaaggaggtgccgagcgttatcgcccgtcatgttagtccgtacgcgtgccagcgcaagaccacgctgaataactacaacaaaaagatcaccgacgcgctggagatcatggccgagaactacaagtttaaagagaacctgcaggcgcgcctggaggcccgtcgcgccgcgagtgtcctgaaaagcctgccgttcgaggttaccagcatgaaagacatccaaggtctgccgtgcattaccgacgacgtacgtcctgtgatcgaagagatcatcgaagtaggcgagagcagccgtgttaaagaaatcctcaatgacgagcgctacaaggcctttaagcagttcaccagcgtgttcggtgtgggcgtcaagaccgcggaaaagtggtaccgtatgggcctccgtacgctggaagaagtaccggccagtaagttcctgaagctgaacaagatgcagaaggcgggcttcctgtactacgaggatctggcgagcggtgttacgaaagaagaaaaagatgccgttctggatatcgtgaaggaaacggtgtggactgttgatccggatgcgctggtgaccatcgtgggcggtttccgccgtggcaaacctcagggccacgacgttgacctgctgatcacgattccgggccgtcctacggatccggagctgctccacaacgtggttgatctgctcaagaagcaaggtctgctgctgtacggggacatccgtgagcgtacgttcgtggaggggcaactgccaaatcctaaacctgaccagctggacaatcatcagaagtgcttcgccattctcaagctgtaccgcccgaaggtggataacagtgcggttgggacgtcgaagaaagtcgacatggctgaggttaaggattggaaagcggttcgtgtggatctggtggtcgctccagatgagcagttcgcctatgcgaaactcggttggacgggcagcggcatgtttcgtcgcgatactcgtcgctacgcggaggaagagcgcgacatgctgctcgacaaccatggtctctacgacctgaaaaagggcatttttctgagtgcggacagcgaagaagagattttcggtcatctggacctggattatctggagccgtgggaacgcaacgcg

SEQ ID NO: 6372 - protein, 394 aa, synthetic construct
  REGION 1..394: note = Variant of terminal deoxynucleotidyl transferase
MHHHHHHGGSGHPEGNTPEKEVPSVIARHVSPYACQRKTTLNNYNKKITDALEIMAENYKFKENLQARLEARRAASVLKSLPFEVTSMKDIQGLPCITDDVRPVIEEIIEVGESSRVKEILNDERYKAFKQFTSVFGVGVKTAEKWYRMGLRTLEEVPASKFLKLNKMQKAGFLYYEDLASGVTKEEKDAVLDIVKETVWTVDPDALVTIVGGFRRGKPQGHDVDLLITIPGRPTDPELLHNVVDLLKKQGLLLYGDIRERTFVEGQLPNPKPDQLDNHQKCFAILKLYRPKVDNSAVGTSKKVDMAEVKDWKAVRVDLVVAPDEQFAYAKLGWTGSGMFRRDTRRYAEEERDMLLDNHGLYDLKKGIFLSADSEEEIFGHLDLDYLEPWERNA

SEQ ID NO: 6373 - DNA, 1182 bp, synthetic construct
  misc_feature 1..1182: note = Variant of terminal deoxynucleotidyl transferase
  source 1..1182: mol_type = other DNA
atgcaccatcatcaccatcacgggggctccggccatccggaaggtaataccccggagaaggaggtgccgagcgttatcgcccgtcatgttagtccgtacgcgtgccagcgcaagaccacgctgaataactacaacaaaaagatcaccgacgcgctggagatcatggccgagaactacaagtttaaagagaacctggtggcgcgcctggaggcccgtcgcgccgcgagtgtcctgaaaagcctgccgttcgaggttaccagcatgaaagacatccaaggtctgccgtgcattaccgacgacgtacgtcctgtgatcgaagagatcatcgaagtaggcgagagcagccgtgttaaagaaatcctcaatgacgagcgctacaaggcctttaagcagttcaccagcgtgttcggtgtgggcgtcaagaccgcggaaaagtggtaccgtatgggcctccgtacgctggaagaagtaaaggccagtaagttcctgaagctgaacaagatgcagaaggcgggcttcctgtactacgaggatctggcgagcggtgttacgaaagaagaaaaagatgccgttctggatatcgtgaaggaaacggtgtggactgttgatccggatgcgctggtgaccatcgtgggcggtttccgccgtggcaaacctcagggccacgacgttgacctgctgatcacgattccgggccgtcctacggatccggagctgctccacaacgtggttgatctgctcaagaagcaaggtctgctgctgtacggggacatccgtgagcgtacgttcgtggaggggcaactgccaaatcctaaacctgaccagctggacaatcatcagaagtgcttcgccattctcaagctgtaccgcccgaaggtggataacagtgcggttgggacgtcgaagaaagtcgacatggctgaggttaaggattggaaagcggttcgtgtggatctggtggtcgctccagatgagcagttcgcctatgcgaaactcggttggacgggcagcggcatgtttcgtcgcgatactcgtcgctacgcggaggaagagcgcgacatgctgctcgacaaccatggtctctacgacctgaaaaagggcatttttctgagtgcggacagcgaagaagagattttcggtcatctggacctggattatctggagccgtgggaacgcaacgcg

SEQ ID NO: 6374 - protein, 394 aa, synthetic construct
  REGION 1..394: note = Variant of terminal deoxynucleotidyl transferase
MHHHHHHGGSGHPEGNTPEKEVPSVIARHVSPYACQRKTTLNNYNKKITDALEIMAENYKFKENLVARLEARRAASVLKSLPFEVTSMKDIQGLPCITDDVRPVIEEIIEVGESSRVKEILNDERYKAFKQFTSVFGVGVKTAEKWYRMGLRTLEEVKASKFLKLNKMQKAGFLYYEDLASGVTKEEKDAVLDIVKETVWTVDPDALVTIVGGFRRGKPQGHDVDLLITIPGRPTDPELLHNVVDLLKKQGLLLYGDIRERTFVEGQLPNPKPDQLDNHQKCFAILKLYRPKVDNSAVGTSKKVDMAEVKDWKAVRVDLVVAPDEQFAYAKLGWTGSGMFRRDTRRYAEEERDMLLDNHGLYDLKKGIFLSADSEEEIFGHLDLDYLEPWERNA

SEQ ID NO: 6375 - DNA, 1182 bp, synthetic construct
  misc_feature 1..1182: note = Variant of terminal deoxynucleotidyl transferase
  source 1..1182: mol_type = other DNA
atgcaccatcatcaccatcacgggggctccggccatccggaaggtaataccccggagaaggaggtgccgagcgttatcgcccgtcatgttagtccgtacgcgtgccagcgcaagaccacgctgaataactacaacaaaaagatcaccgacgcgctggagatcatggccgagaactacaagtttaaagagaacctgcaggcgcgcctggaggcccgtcgcgccgcgagtgtcctgaaaagcctgccgttcgaggttaccagcatgaaagacatccaaggtctgccgtgcattaccgacgacgtacgtcctgtgatcgaagagatcatcgaagtaggcgagagcagccgtgttaaagaaatcctcaatgacgagcgctacaaggcctttaagcagttcaccagcgtgttcggtgtgggcgtcaagaccgcggaaaagtggtaccgtgggggcctccgtacgctggaagaagtaaaggccagtaagttcctgaagctgaacaagatgcagaaggcgggcttcctgtactacgaggatctggcgagcggtgttacgaaagaagaaaaagatgccgttctggatatcgtgaaggaaacggtgtggactgttgatccggatgcgctggtgaccatcgtgggcggtttccgccgtggcaaacctcagggccacgacgttgacctgctgatcacgattccgggccgtcctacggatccggagctgctccacaacgtggttgatctgctcaagaagcaaggtctgctgctgtacggggacatccgtgagcgtacgttcgtggaggggcaactgccaaatcctaaacctgaccagctggacaatcatcagaagtgcttcgccattctcaagctgtaccgcccgaaggtggataacagtgcggttgggacgtcgaagaaagtcgacatggctgaggttaaggattggaaagcggttcgtgtggatctggtggtcgctccagatgagcagttcgcctatgcgaaactcggttggacgggcagcggcatgtttcgtcgcgatactcgtcgctacgcggaggaagagcgcgacatgctgctcgacaaccatggtctctacgacctgaaaaagggcatttttctgagtgcggacagcgaagaagagattttcggtcatctggacctggattatctggagccgtgggaacgcaacgcg

SEQ ID NO: 6376 - protein, 394 aa, synthetic construct
  REGION 1..394: note = Variant of terminal deoxynucleotidyl transferase
MHHHHHHGGSGHPEGNTPEKEVPSVIARHVSPYACQRKTTLNNYNKKITDALEIMAENYKFKENLQARLEARRAASVLKSLPFEVTSMKDIQGLPCITDDVRPVIEEIIEVGESSRVKEILNDERYKAFKQFTSVFGVGVKTAEKWYRGGLRTLEEVKASKFLKLNKMQKAGFLYYEDLASGVTKEEKDAVLDIVKETVWTVDPDALVTIVGGFRRGKPQGHDVDLLITIPGRPTDPELLHNVVDLLKKQGLLLYGDIRERTFVEGQLPNPKPDQLDNHQKCFAILKLYRPKVDNSAVGTSKKVDMAEVKDWKAVRVDLVVAPDEQFAYAKLGWTGSGMFRRDTRRYAEEERDMLLDNHGLYDLKKGIFLSADSEEEIFGHLDLDYLEPWERNA

SEQ ID NO: 6377 - DNA, 1182 bp, synthetic construct
  misc_feature 1..1182: note = Variant of terminal deoxynucleotidyl transferase
  source 1..1182: mol_type = other DNA
atgcaccatcatcaccatcacgggggctccggccatccggaaggtaataccccggagaaggaggtgccgagcgttatcgcccgtcatgttagtccgtacgcgtgccagcgcaagaccacgctgaataactacaacaaaaagatcaccgacgcgctggagatcatggccgagaactacaagtttaaagagaacctgcaggcgcgcctggaggcccgtcgcgccgcgagtgtcctgaaaagcctgccgttcgaggttaccagcatgaaagacatccaaggtctgccgtgcattaccgacgacgtacgtcctgtgatcgaagagatcatcgaagtaggcgagagcagccgtgttaaagaaatcctcaatgacgagcgctacaaggcctttaagcagttcaccagcgtgttcggtgtgggcgtcaagaccgcggaaaagtggtaccgtatgggcctccgtacgctggaagaagtaaaggccagtaagttcctgaagctgaacaagatgcagaaggcgggcttcctgtactacgaggatctggcgagcggtgttacgaaagaagaaaaagatgccgttctggatatcgtgaaggaaacggtgtggactgttgatccggatgcgctggtggctatcgccggcggtttccgccgtggcaaacctcagggccacgacgttgacctgctgatcacgattccgggccgtcctacggatccggagctgctccacaacgtggttgatctgctcaagaagcaaggtctgctgctgtacggggacatccgtgagcgtacgttcgtggaggggcaactgccaaatcctaaacctgaccagctggacaatcatcagaagtgcttcgccattctcaagctgtaccgcccgaaggtggataacagtgcggttgggacgtcgaagaaagtcgacatggctgaggttaaggattggaaagcggttcgtgtggatctggtggtcgctccagatgagcagttcgcctatgcgaaactcggttggacgggcagcggcatgtttcgtcgcgatactcgtcgctacgcggaggaagagcgcgacatgctgctcgacaaccatggtctctacgacctgaaaaagggcatttttctgagtgcggacagcgaagaagagattttcggtcatctggacctggattatctggagccgtgggaacgcaacgcg

SEQ ID NO: 6378 - protein, 394 aa, synthetic construct
  REGION 1..394: note = Variant of terminal deoxynucleotidyl transferase
MHHHHHHGGSGHPEGNTPEKEVPSVIARHVSPYACQRKTTLNNYNKKITDALEIMAENYKFKENLQARLEARRAASVLKSLPFEVTSMKDIQGLPCITDDVRPVIEEIIEVGESSRVKEILNDERYKAFKQFTSVFGVGVKTAEKWYRMGLRTLEEVKASKFLKLNKMQKAGFLYYEDLASGVTKEEKDAVLDIVKETVWTVDPDALVAIAGGFRRGKPQGHDVDLLITIPGRPTDPELLHNVVDLLKKQGLLLYGDIRERTFVEGQLPNPKPDQLDNHQKCFAILKLYRPKVDNSAVGTSKKVDMAEVKDWKAVRVDLVVAPDEQFAYAKLGWTGSGMFRRDTRRYAEEERDMLLDNHGLYDLKKGIFLSADSEEEIFGHLDLDYLEPWERNA

SEQ ID NO: 6379 - DNA, 1182 bp, synthetic construct
  misc_feature 1..1182: note = Variant of terminal deoxynucleotidyl transferase
  source 1..1182: mol_type = other DNA
atgcaccatcatcaccatcacgggggctccggccatccggaaggtaataccccggagaaggaggtgccgagcgttatcgcccgtcatgttagtccgtacgcgtgccagcgcaagaccacgctgaataactacaacaaaaagatcaccgacgcgctggagatcatggccgagaactacaagtttaaagagaacctgcaggcgcgcctggaggcccgtcgcgccgcgagtgtcctgaaaagcctgccgttcgaggttaccagcatgaaagacatccaaggtctgccgtgcattaccgacgacgtacgtcctgtgatcgaagagatcatcgaagtaggcgagagcagccgtgttaaagaaatcctcaatgacgagcgctacaaggcctttaagcagttcaccagcgtgttcggtgtgggcgtcaagaccgcggaaaagtggtaccgtatgggcctccgtacgctggaagaagtaaaggccagtaagttcctgaagctgaacaagatgcagaaggcgggcttcctgtactacgaggatctggcgagcggtgttacgaaagaagaaaaagatgccgttctggatatcgtgaaggaaacggtgtggactgttgatccggatgcgctggtgaccatcgtgggcggtttccgccgtggcaaacctcagggccacgacgttgacctgctgatcacggctccgggccgtcctacggatccggagctgctccacaacgtggttgatctgctcaagaagcaaggtctgctgctgtacggggacatccgtgagcgtacgttcgtggaggggcaactgccaaatcctaaacctgaccagctggacaatcatcagaagtgcttcgccattctcaagctgtaccgcccgaaggtggataacagtgcggttgggacgtcgaagaaagtcgacatggctgaggttaaggattggaaagcggttcgtgtggatctggtggtcgctccagatgagcagttcgcctatgcgaaactcggttggacgggcagcggcatgtttcgtcgcgatactcgtcgctacgcggaggaagagcgcgacatgctgctcgacaaccatggtctctacgacctgaaaaagggcatttttctgagtgcggacagcgaagaagagattttcggtcatctggacctggattatctggagccgtgggaacgcaacgcg

SEQ ID NO: 6380 - protein, 394 aa, synthetic construct
  REGION 1..394: note = Variant of terminal deoxynucleotidyl transferase
MHHHHHHGGSGHPEGNTPEKEVPSVIARHVSPYACQRKTTLNNYNKKITDALEIMAENYKFKENLQARLEARRAASVLKSLPFEVTSMKDIQGLPCITDDVRPVIEEIIEVGESSRVKEILNDERYKAFKQFTSVFGVGVKTAEKWYRMGLRTLEEVKASKFLKLNKMQKAGFLYYEDLASGVTKEEKDAVLDIVKETVWTVDPDALVTIVGGFRRGKPQGHDVDLLITAPGRPTDPELLHNVVDLLKKQGLLLYGDIRERTFVEGQLPNPKPDQLDNHQKCFAILKLYRPKVDNSAVGTSKKVDMAEVKDWKAVRVDLVVAPDEQFAYAKLGWTGSGMFRRDTRRYAEEERDMLLDNHGLYDLKKGIFLSADSEEEIFGHLDLDYLEPWERNA

SEQ ID NO: 6381 - DNA, 1182 bp, synthetic construct
  misc_feature 1..1182: note = Variant of terminal deoxynucleotidyl transferase
  source 1..1182: mol_type = other DNA
atgcaccatcatcaccatcacgggggctccggccatccggaaggtaataccccggagaaggaggtgccgagcgttatcgcccgtcatgttagtccgtacgcgtgccagcgcaagaccacgctgaataactacaacaaaaagatcaccgacgcgctggagatcatggccgagaactacaagtttaaagagaacctgcaggcgcgcctggaggcccgtcgcgccgcgagtgtcctgaaaagcctgccgttcgaggttaccagcatgaaagacatccaaggtctgccgtgcattaccgacgacgtacgtcctgtgatcgaagagatcatcgaagtaggcgagagcagccgtgttaaagaaatcctcaatgacgagcgctacaaggcctttaagcagttcaccagcgtgttcggtgtgggcgtcaagaccgcggaaaagtggtaccgtatgggcctccgtacgctggaagaagtagatgccagtaagttcctgaagctgaacaagatgcagaaggcgggcttcctgtactacgaggatctggcgagcggtgttacgaaagaagaaaaagatgccgttctggatatcgtgaaggaaacggtgtggactgttgatccggatgcgctggtgaccatcgtgggcggtttccgccgtggcaaacctcagggccacgacgttgacctgctgatcacgattccgggccgtcctacggatccggagctgctccacaacgtggttgatctgctcaagaagcaaggtctgctgctgtacggggacatccgtgagcgtacgttcgtggaggggcaactgccaaatcctaaacctgaccagctggacaatcatcagaagtgcttcgccattctcaagctgtaccgcccgaaggtggataacagtgcggttgggacgtcgaagaaagtcgacatggctgaggttaaggattggaaagcggttcgtgtggatctggtggtcgctccagatgagcagttcgcctatgcgaaactcggttggacgggcagcggcatgtttcgtcgcgatactcgtcgctacgcggaggaagagcgcgacatgctgctcgacaaccatggtctctacgacctgaaaaagggcatttttctgagtgcggacagcgaagaagagattttcggtcatctggacctggattatctggagccgtgggaacgcaacgcg

SEQ ID NO: 6382 - protein, 394 aa, synthetic construct
  REGION 1..394: note = Variant of terminal deoxynucleotidyl transferase
MHHHHHHGGSGHPEGNTPEKEVPSVIARHVSPYACQRKTTLNNYNKKITDALEIMAENYKFKENLQARLEARRAASVLKSLPFEVTSMKDIQGLPCITDDVRPVIEEIIEVGESSRVKEILNDERYKAFKQFTSVFGVGVKTAEKWYRMGLRTLEEVDASKFLKLNKMQKAGFLYYEDLASGVTKEEKDAVLDIVKETVWTVDPDALVTIVGGFRRGKPQGHDVDLLITIPGRPTDPELLHNVVDLLKKQGLLLYGDIRERTFVEGQLPNPKPDQLDNHQKCFAILKLYRPKVDNSAVGTSKKVDMAEVKDWKAVRVDLVVAPDEQFAYAKLGWTGSGMFRRDTRRYAEEERDMLLDNHGLYDLKKGIFLSADSEEEIFGHLDLDYLEPWERNA

SEQ ID NO: 6383 - DNA, 1182 bp, synthetic construct
  misc_feature 1..1182: note = Variant of terminal deoxynucleotidyl transferase
  source 1..1182: mol_type = other DNA
atgcaccatcatcaccatcacgggggctccggccatccggaaggtaataccccggagaaggaggtgccgagcgttatcgcccgtcatgttagtccgtacgcgtgccagcgcaagaccacgctgaataactacaacaaaaagatcaccgacgcgctggagatcatggccgagaactacaagtttaaagagaacctgcaggcgcgcctggaggcccgtcgcgccgcgagtgtcctgaaaagcctgccgttcgaggttaccagcatgaaagacatccaaggtctgccgtgcattaccgacgacgtacgtcctgtgatcgaagagatcatcgaagtaggcgagagcagccgtgttaaagaaatcctcaatgacgagcgctacaaggcctttaagcagttcaccagcgtgttcggtgtgggcgtcaagaccgcggaaaagtggtaccgtatgggcctccgtacgctggaagaagtaaaggccagtaagttcctgaagctgaacaagatgcagaaggcgggcttcctgtactacgaggatctggcgagcggtgttacgaaagaagaaaaagatgccgttctggatatcgtgaaggaaacggtgtggactgttgatccggatgcgctggtgcatatcgccggcggtttccgccgtggcaaacctcagggccacgacgttgacctgctgatcacgattccgggccgtcctacggatccggagctgctccacaacgtggttgatctgctcaagaagcaaggtctgctgctgtacggggacatccgtgagcgtacgttcgtggaggggcaactgccaaatcctaaacctgaccagctggacaatcatcagaagtgcttcgccattctcaagctgtaccgcccgaaggtggataacagtgcggttgggacgtcgaagaaagtcgacatggctgaggttaaggattggaaagcggttcgtgtggatctggtggtcgctccagatgagcagttcgcctatgcgaaactcggttggacgggcagcggcatgtttcgtcgcgatactcgtcgctacgcggaggaagagcgcgacatgctgctcgacaaccatggtctctacgacctgaaaaagggcatttttctgagtgcggacagcgaagaagagattttcggtcatctggacctggattatctggagccgtgggaacgcaacgcg

SEQ ID NO: 6384 - protein, 394 aa, synthetic construct
  REGION 1..394: note = Variant of terminal deoxynucleotidyl transferase
MHHHHHHGGSGHPEGNTPEKEVPSVIARHVSPYACQRKTTLNNYNKKITDALEIMAENYKFKENLQARLEARRAASVLKSLPFEVTSMKDIQGLPCITDDVRPVIEEIIEVGESSRVKEILNDERYKAFKQFTSVFGVGVKTAEKWYRMGLRTLEEVKASKFLKLNKMQKAGFLYYEDLASGVTKEEKDAVLDIVKETVWTVDPDALVHIAGGFRRGKPQGHDVDLLITIPGRPTDPELLHNVVDLLKKQGLLLYGDIRERTFVEGQLPNPKPDQLDNHQKCFAILKLYRPKVDNSAVGTSKKVDMAEVKDWKAVRVDLVVAPDEQFAYAKLGWTGSGMFRRDTRRYAEEERDMLLDNHGLYDLKKGIFLSADSEEEIFGHLDLDYLEPWERNA

SEQ ID NO: 6385 - DNA, 1182 bp, synthetic construct
  misc_feature 1..1182: note = Variant of terminal deoxynucleotidyl transferase
  source 1..1182: mol_type = other DNA
atgcaccatcatcaccatcacgggggctccggccatccggaaggtaataccccggagaaggaggtgccgagcgttatcgcccgtcatgttagtccgtacgcgtgccagcgcaagaccacgctgaataactacaacaaaaagatcaccgacgcgctggagatcatggccgagaactacaagtttaaagagaacctgcaggcgcgcctggaggcccgtcgcgccgcgagtgtcctgaaaagcctgccgttcgaggttaccagcatgaaagacatccaaggtctgccgtgcattaccgacgacgtacgtcctgtgatcgaagagatcatcgaagtaggcgagagcagccgtgttaaagaaatcctcaatgacgagcgctacaaggcctttaagcagttcaccagcgtgttcggtgtgggcgtcaagaccgcggaaaagtggtaccgtatgggcctccgtacgctggaagaagtaaaggccagtaagttcctgaagctgaacaagatgcagaaggcgggcttcctgtactacgaggatctggcgagcggtgttacgaaagaagaaaaagatgccgttctggatatcgtgaaggaaacggtgtggactgttgatccggatgcgctggtgaccatcgtgggcggtttccgccgtggcaaacctcagggccacgacgttgacctgctgatcacgattccgggccgtcctacggatccggagctgctccacaacgtggttgatctgctcaagaagcaaggtctgctgctgtacggggacatccgtgagggtacgttcgtggaggggcaactgccaaatcctaaacctgaccagctggacaatcatcagaagtgcttcgccattctcaagctgtaccgcccgaaggtggataacagtgcggttgggacgtcgaagaaagtcgacatggctgaggttaaggattggaaagcggttcgtgtggatctggtggtcgctccagatgagcagttcgcctatgcgaaactcggttggacgggcagcggcatgtttcgtcgcgatactcgtcgctacgcggaggaagagcgcgacatgctgctcgacaaccatggtctctacgacctgaaaaagggcatttttctgagtgcggacagcgaagaagagattttcggtcatctggacctggattatctggagccgtgggaacgcaacgcg

SEQ ID NO: 6386 - protein, 394 aa, synthetic construct
  REGION 1..394: note = Variant of terminal deoxynucleotidyl transferase
MHHHHHHGGSGHPEGNTPEKEVPSVIARHVSPYACQRKTTLNNYNKKITDALEIMAENYKFKENLQARLEARRAASVLKSLPFEVTSMKDIQGLPCITDDVRPVIEEIIEVGESSRVKEILNDERYKAFKQFTSVFGVGVKTAEKWYRMGLRTLEEVKASKFLKLNKMQKAGFLYYEDLASGVTKEEKDAVLDIVKETVWTVDPDALVTIVGGFRRGKPQGHDVDLLITIPGRPTDPELLHNVVDLLKKQGLLLYGDIREGTFVEGQLPNPKPDQLDNHQKCFAILKLYRPKVDNSAVGTSKKVDMAEVKDWKAVRVDLVVAPDEQFAYAKLGWTGSGMFRRDTRRYAEEERDMLLDNHGLYDLKKGIFLSADSEEEIFGHLDLDYLEPWERNA

SEQ ID NO: 6387 - DNA, 1182 bp, synthetic construct
  misc_feature 1..1182: note = Variant of terminal deoxynucleotidyl transferase
  source 1..1182: mol_type = other DNA
atgcaccatcatcaccatcacgggggctccggccatccggaaggtaataccccggagaaggaggtgccgagcgttatcgcccgtcatgttagtccgtacgcgtgccagcgcaagaccacgctgaataactacaacaaaaagatcaccgacgcgctggagatcatggccgagaactacaagtttaaagagaacctgcaggcgcgcctggaggcccgtcgcgccgcgagtgtcctgaaaagcctgccgttcgaggttaccagcatgaaagacatccaaggtctgccgtgcattaccgacgacgtacgtcctgtgatcgaagagatcatcgaagtaggcgagagcagccgtgttaaagaaatcctcaatgacgagcgctacaaggcctttaagcagttcaccagcgtgttcggtgtgggcgtcaagaccgcggaaaagtggtaccgtatgggcctccgtacgctggaagaagtaaaggccagtaagttcctgaagctgaacaagatgcagaaggcgggcttcctgtactacgaggatctggcgagcggtgttacgaaagaagaaaaagatgccgttctggatatcgtgaaggaaacggtgtggactgttgatccggatgcgctggtgaccatcgtgggcggtttccgccgtggcaaacctcagggccacgacgttgacctgctgatcacgattccgggccgtcctacggatccggagctgctccacaacgtggttgatctgctcaagaagcaaggtctgctgctgtacggggacatccgtgagcgtacgttcgtggaggggcaactgccaaatcctaaacctgaccagctggacaatcatcagaagtgcttcgccattctcaagctgtaccgcccgaaggtggataacagtgcggttgggacgtcgaagaaagtcgacatggctgaggttaaggattggaaagcggttcgtgtggatctggtggtcgctccagatgagcaggctgcctatgcgaaactcggttggacgggcagcggcatgtttcgtcgcgatactcgtcgctacgcggaggaagagcgcgacatgctgctcgacaaccatggtctctacgacctgaaaaagggcatttttctgagtgcggacagcgaagaagagattttcggtcatctggacctggattatctggagccgtgggaacgcaacgcg

SEQ ID NO: 6388 - protein, 394 aa, synthetic construct; identical to SEQ ID NO: 6306
  REGION 1..394: note = Variant of terminal deoxynucleotidyl transferase

SEQ ID NO: 6389 - DNA, 1182 bp, synthetic construct
  misc_feature 1..1182: note = Variant of terminal deoxynucleotidyl transferase
  source 1..1182: mol_type = other DNA
atgcaccatcatcaccatcacgggggctccggccatccggaaggtaataccccggagaaggaggtgccgagcgttatcgcccgtcatgttagtccgtacgcgtgccagcgcaagaccacgctgaataactacaacaaaaagatcaccgacgcgctggagatcatggccgagaactacaagtttaaagagaacctgcaggcgcgcctggaggcccgtcgcgccgcgagtgtcctgaaaagcctgccgttcgaggttaccagcatgaaagacatccaaggtctgccgtgcattaccgacgacgtacgtcctgtgatcgaagagatcatcgaagtaggcgagagcagccgtgttaaagaaatcctcaatgacgagcgctacaaggcctttaagcagttcaccagcgtgttcggtgtgggcgtcaagaccgcggaaaagtggtaccgtatgggcctccgtacgctggaagaagtaaaggccagtaagttcctgaagctgaacaagatgcagaaggcgggcttcctgtactacgaggatctggcgagcggtgttacgaaagaagaaaaagatgccgttctggatatcgtgaaggaaacggtgtggactgttgatccggatgcgctggtgaccatcgtgggcggtttccgccgtggcaaacctcagggccacgacgttgacctgctgatcacgattccgggccgtcctacggatccggagctgctccacaacgtggttgatctgctcaagaagcaaggtctgctgctgtacggggacatccgtgagcgtacgttcgtggaggggcaactgccaaatcctaaacctgacgtgctggacaatcatcagaagtgcttcgccattctcaagctgtaccgcccgaaggtggataacagtgcggttgggacgtcgaagaaagtcgacatggctgaggttaaggattggaaagcggttcgtgtggatctggtggtcgctccagatgagcagttcgcctatgcgaaactcggttggacgggcagcggcatgtttcgtcgcgatactcgtcgctacgcggaggaagagcgcgacatgctgctcgacaaccatggtctctacgacctgaaaaagggcatttttctgagtgcggacagcgaagaagagattttcggtcatctggacctggattatctggagccgtgggaacgcaacgcg

SEQ ID NO: 6390 - protein, 394 aa, synthetic construct
  REGION 1..394: note = Variant of terminal deoxynucleotidyl transferase
MHHHHHHGGSGHPEGNTPEKEVPSVIARHVSPYACQRKTTLNNYNKKITDALEIMAENYKFKENLQARLEARRAASVLKSLPFEVTSMKDIQGLPCITDDVRPVIEEIIEVGESSRVKEILNDERYKAFKQFTSVFGVGVKTAEKWYRMGLRTLEEVKASKFLKLNKMQKAGFLYYEDLASGVTKEEKDAVLDIVKETVWTVDPDALVTIVGGFRRGKPQGHDVDLLITIPGRPTDPELLHNVVDLLKKQGLLLYGDIRERTFVEGQLPNPKPDVLDNHQKCFAILKLYRPKVDNSAVGTSKKVDMAEVKDWKAVRVDLVVAPDEQFAYAKLGWTGSGMFRRDTRRYAEEERDMLLDNHGLYDLKKGIFLSADSEEEIFGHLDLDYLEPWERNA

SEQ ID NO: 6391 - DNA, 1182 bp, synthetic construct
  misc_feature 1..1182: note = Variant of terminal deoxynucleotidyl transferase
  source 1..1182: mol_type = other DNA
atgcaccatcatcaccatcacgggggctccggccatccggaaggtaataccccggagaaggaggtgccgagcgttatcgcccgtcatgttagtccgtacgcgtgccagcgcaagaccacgctgaataactacaacaaaaagatcaccgacgcgctggaaatcatggccgagaaccagaagtttaaagagaacctgcaggcgcgcctggaggcccgtcgcgccgcgagtgtcctgaaaagcctgccgttcgaggttaccagcatgaaagacatccaaggtctgccgtgcattaccgacgacgtacgtcctgtgatcgaagagatcatcgaagtaggcgagagcagccgtgttaaagaaatcctcaatgacgagcgctacaaggcctttaagcagttcaccagcgtgttcggtgtgggcgtcaagaccgcggaaaagtggtaccgtatgggcctccgtacgctggaagaagtaaaggccagtaagttcctgaagctgaacaagatgcagaaggcgggcttcctgtactacgaggatctggcgagcggtgttacgaaagaagaaaaagatgccgttctggatatcgtgaaggaaacggtgtggactgttgatccggatgcgctggtgaccatcgtgggcggtttccgccgtggcaaacctcagggccacgacgttgacctgctgatcacgattccgggccgtcctacggatccggagctgctccacaacgtggttgatctgctcaagaagcaaggtctgctgctgtacggggacatccgtgagcgtacgttcgtggaggggcaactgccaaatcctaaacctgaccagctggacaatcatcagaagtgcttcgccattctcaagctgtaccgcccgaaggtggataacagtgcggttgggacgtcgaagaaagtcgacatggctgaggttaaggattggaaagcggttcgtgtggatctggtggtcgctccagatgagcagttcgcctatgcgaaactcggttggacgggcagcggcatgtttcgtcgcgatactcgtcgctacgcggaggaagagcgcgacatgctgctcgacaaccatggtctctacgacctgaaaaagggcatttttctgagtgcggacagcgaagaagagattttcggtcatctggacctggattatctggagccgtgggaacgcaacgcg

SEQ ID NO: 6392 - protein, 394 aa, synthetic construct
  REGION 1..394: note = Variant of terminal deoxynucleotidyl transferase
MHHHHHHGGSGHPEGNTPEKEVPSVIARHVSPYACQRKTTLNNYNKKITDALEIMAENQKFKENLQARLEARRAASVLKSLPFEVTSMKDIQGLPCITDDVRPVIEEIIEVGESSRVKEILNDERYKAFKQFTSVFGVGVKTAEKWYRMGLRTLEEVKASKFLKLNKMQKAGFLYYEDLASGVTKEEKDAVLDIVKETVWTVDPDALVTIVGGFRRGKPQGHDVDLLITIPGRPTDPELLHNVVDLLKKQGLLLYGDIRERTFVEGQLPNPKPDQLDNHQKCFAILKLYRPKVDNSAVGTSKKVDMAEVKDWKAVRVDLVVAPDEQFAYAKLGWTGSGMFRRDTRRYAEEERDMLLDNHGLYDLKKGIFLSADSEEEIFGHLDLDYLEPWERNA

SEQ ID NO: 6393 - DNA, 1182 bp, synthetic construct
  misc_feature 1..1182: note = Variant of terminal deoxynucleotidyl transferase
  source 1..1182: mol_type = other DNA
atgcaccatcatcaccatcacgggggctccggccatccggaaggtaataccccggagaaggaggtgccgagcgttatcgcccgtcatgttagtccgtacgcgtgccagcgcaagaccacgctgaataactacaacaaaaagatcaccgacgcgctggagatcatggccgagaactacaagtttaaagagaacctgcaggcgcgcctggaggcccgtcgcgccgcgagtgtcctgaaaagcctgccgttcgaggttaccagcatgaaagacatccaaggtctgccgtgcattaccgacgacgtacgtcctgtgatcgaagagatcatcgaagtaggcgagagcagccgtgttaaagaaatcctcaatgacgagcgctacaaggcctttaagcagttcaccagcgtgttcggtgtgggcgtcaagaccgcggaaaagtggtaccgtatgggcctccgtacgctggaagaagtaaaggccagtaagttcctgaagctgaacaagatgcagaaggcgggcttcctgtactacgaggatctggcgagcggtgttacgaaagaagaaaaagatgccgttctggatatcgtgaaggaaacggtgtggactgttgatccggatgcgctggtgaccatcgtgggcggtttccgccgtggcaaacctcagggccacgacgttgacctgctgatcacgattccgggccgtcctacggatccggagctgctccacggtgtggttgatctgctcaagaagcaaggtctgctgctgtacggggacatccgtgagcgtacgttcgtggaggggcaactgccaaatcctaaacctgaccagctggacaatcatcagaagtgcttcgccattctcaagctgtaccgcccgaaggtggataacagtgcggttgggacgtcgaagaaagtcgacatggctgaggttaaggattggaaagcggttcgtgtggatctggtggtcgctccagatgagcagttcgcctatgcgaaactcggttggacgggcagcggcatgtttcgtcgcgatactcgtcgctacgcggaggaagagcgcgacatgctgctcgacaaccatggtctctacgacctgaaaaagggcatttttctgagtgcggacagcgaagaagagattttcggtcatctggacctggattatctggagccgtgggaacgcaacgcg

SEQ ID NO: 6394 - protein, 394 aa, synthetic construct
  REGION 1..394: note = Variant of terminal deoxynucleotidyl transferase
MHHHHHHGGSGHPEGNTPEKEVPSVIARHVSPYACQRKTTLNNYNKKITDALEIMAENYKFKENLQARLEARRAASVLKSLPFEVTSMKDIQGLPCITDDVRPVIEEIIEVGESSRVKEILNDERYKAFKQFTSVFGVGVKTAEKWYRMGLRTLEEVKASKFLKLNKMQKAGFLYYEDLASGVTKEEKDAVLDIVKETVWTVDPDALVTIVGGFRRGKPQGHDVDLLITIPGRPTDPELLHGVVDLLKKQGLLLYGDIRERTFVEGQLPNPKPDQLDNHQKCFAILKLYRPKVDNSAVGTSKKVDMAEVKDWKAVRVDLVVAPDEQFAYAKLGWTGSGMFRRDTRRYAEEERDMLLDNHGLYDLKKGIFLSADSEEEIFGHLDLDYLEPWERNA

SEQ ID NO: 6395 - DNA, 1182 bp, synthetic construct
  misc_feature 1..1182: note = Variant of terminal deoxynucleotidyl transferase
  source 1..1182: mol_type = other DNA
atgcaccatcatcaccatcacgggggctccggccatccggaaggtaataccccggagaaggaggtgccgagcgttatcgcccgtcatgttagtccgtacgcgtgccagcgcaagaccacgctgaataactacaacaaaaagatcaccgacgcgctggagatcatggccgagaactacaagtttaaagagaacctgcaggcgcgcctggaggcccgtcgcgccgcgagtgtcctgaggagcctgccgttcgaggttaccagcatgaaagacatccaaggtctgccgtgcattaccgacgacgtacgtcctgtgatcgaagagatcatcgaagtaggcgagagcagccgtgttaaagaaatcctcaatgacgagcgctacaaggcctttaagcagttcaccagcgtgttcggtgtgggcgtcaagaccgcggaaaagtggtaccgtatgggcctccgtacgctggaagaagtaaaggccagtaagttcctgaagctgaacaagatgcagaaggcgggcttcctgtactacgaggatctggcgagcggtgttacgaaagaagaaaaagatgccgttctggatatcgtgaaggaaacggtgtggactgttgatccggatgcgctggtgaccatcgtgggcggtttccgccgtggcaaacctcagggccacgacgttgacctgctgatcacgattccgggccgtcctacggatccggagctgctccacaacgtggttgatctgctcaagaagcaaggtctgctgctgtacggggacatccgtgagcgtacgttcgtggaggggcaactgccaaatcctaaacctgaccagctggacaatcatcagaagtgcttcgccattctcaagctgtaccgcccgaaggtggataacagtgcggttgggacgtcgaagaaagtcgacatggctgaggttaaggattggaaagcggttcgtgtggatctggtggtcgctccagatgagcagttcgcctatgcgaaactcggttggacgggcagcggcatgtttcgtcgcgatactcgtcgctacgcggaggaagagcgcgacatgctgctcgacaaccatggtctctacgacctgaaaaagggcatttttctgagtgcggacagcgaagaagagattttcggtcatctggacctggattatctggagccgtgggaacgcaacgcg

SEQ ID NO: 6396 - protein, 394 aa, synthetic construct
  REGION 1..394: note = Variant of terminal deoxynucleotidyl transferase
MHHHHHHGGSGHPEGNTPEKEVPSVIARHVSPYACQRKTTLNNYNKKITDALEIMAENYKFKENLQARLEARRAASVLRSLPFEVTSMKDIQGLPCITDDVRPVIEEIIEVGESSRVKEILNDERYKAFKQFTSVFGVGVKTAEKWYRMGLRTLEEVKASKFLKLNKMQKAGFLYYEDLASGVTKEEKDAVLDIVKETVWTVDPDALVTIVGGFRRGKPQGHDVDLLITIPGRPTDPELLHNVVDLLKKQGLLLYGDIRERTFVEGQLPNPKPDQLDNHQKCFAILKLYRPKVDNSAVGTSKKVDMAEVKDWKAVRVDLVVAPDEQFAYAKLGWTGSGMFRRDTRRYAEEERDMLLDNHGLYDLKKGIFLSADSEEEIFGHLDLDYLEPWERNA

SEQ ID NO: 6397 - DNA, 1182 bp, synthetic construct
  misc_feature 1..1182: note = Variant of terminal deoxynucleotidyl transferase
  source 1..1182: mol_type = other DNA
atgcaccatcatcaccatcacgggggctccggccatccggaaggtaataccccggagaaggaggtgccgagcgttatcgcccgtcatgttagtccgtacgcgtgccagcgcaagaccacgctgaataactacaacaaaaagatcaccgacgcgctggagatcatggccgagaactacaagtttaaagagaacctgcaggcgcgcctggaggcccgtcgcgccgcgagtgtcctgaaaagcctgccgttcgaggttaccagcatgaaagacatccaaggtctgccgtgcattaccgacgacgtacgtcctgtgatcgaagagatcatcgaagtaggcgagagcagccgtgttaaagaaatcctcaatgacgagcgctacaaggcctttaagcagttcaccagcgtgttcggtgtgggcgtcaagaccgcggaaaagtggtaccgtatgggcctccgtacgctggaagaagtaggggccagtaagttcctgaagctgaacaagatgcagaaggcgggcttcctgtactacgaggatctggcgagcggtgttacgaaagaagaaaaagatgccgttctggatatcgtgaaggaaacggtgtggactgttgatccggatgcgctggtgaccatcgtgggcggtttccgccgtggcaaacctcagggccacgacgttgacctgctgatcacgattccgggccgtcctacggatccggagctgctccacaacgtggttgatctgctcaagaagcaaggtctgctgctgtacggggacatccgtgagcgtacgttcgtggaggggcaactgccaaatcctaaacctgaccagctggacaatcatcagaagtgcttcgccattctcaagctgtaccgcccgaaggtggataacagtgcggttgggacgtcgaagaaagtcgacatggctgaggttaaggattggaaagcggttcgtgtggatctggtggtcgctccagatgagcagttcgcctatgcgaaactcggttggacgggcagcggcatgtttcgtcgcgatactcgtcgctacgcggaggaagagcgcgacatgctgctcgacaaccatggtctctacgacctgaaaaagggcatttttctgagtgcggacagcgaagaagagattttcggtcatctggacctggattatctggagccgtgggaacgcaacgcg

SEQ ID NO: 6398 - protein, 394 aa, synthetic construct
  REGION 1..394: note = Variant of terminal deoxynucleotidyl transferase
MHHHHHHGGSGHPEGNTPEKEVPSVIARHVSPYACQRKTTLNNYNKKITDALEIMAENYKFKENLQARLEARRAASVLKSLPFEVTSMKDIQGLPCITDDVRPVIEEIIEVGESSRVKEILNDERYKAFKQFTSVFGVGVKTAEKWYRMGLRTLEEVGASKFLKLNKMQKAGFLYYEDLASGVTKEEKDAVLDIVKETVWTVDPDALVTIVGGFRRGKPQGHDVDLLITIPGRPTDPELLHNVVDLLKKQGLLLYGDIRERTFVEGQLPNPKPDQLDNHQKCFAILKLYRPKVDNSAVGTSKKVDMAEVKDWKAVRVDLVVAPDEQFAYAKLGWTGSGMFRRDTRRYAEEERDMLLDNHGLYDLKKGIFLSADSEEEIFGHLDLDYLEPWERNA

SEQ ID NO: 6399 - DNA, 1182 bp, synthetic construct
  misc_feature 1..1182: note = Variant of terminal deoxynucleotidyl transferase
  source 1..1182: mol_type = other DNA
atgcaccatcatcaccatcacgggggctccggccatccggaaggtaataccccggagaaggaggtgccgagcgttatcgcccgtcatgttagtccgtacgcgtgccagcgcaagaccacgctgaataactacaacaaaaagatcaccgacgcgctggagatcatggccgagaactacaagtttaaagagaacctgcaggcgcgcctggaggcccgtcgcgccgcgagtgtcctgaaaagcctgccgttcgaggttaccagcatgaaagacatccaaggtctgccgtgcattaccgacgacgtacgtcctgtgatcgaagagatcatcgaagtaggcgagagcagccgtgttaaagaaatcctcaatgacgagcgctacaaggcctttaagcagttcaccagcgtgttcggtgtgggcgtcaagaccgcggaaaagtggtaccgtatgggcctccgtacgctggaacatgtaaaggccagtaagttcctgaagctgaacaagatgcagaaggcgggcttcctgtactacgaggatctggcgagcggtgttacgaaagaagaaaaagatgccgttctggatatcgtgaaggaaacggtgtggactgttgatccggatgcgctggtgaccatcgtgggcggtttccgccgtggcaaacctcagggccacgacgttgacctgctgatcacgattccgggccgtcctacggatccggagctgctccacaacgtggttgatctgctcaagaagcaaggtctgctgctgtacggggacatccgtgagcgtacgttcgtggaggggcaactgccaaatcctaaacctgaccagctggacaatcatcagaagtgcttcgccattctcaagctgtaccgcccgaaggtggataacagtgcggttgggacgtcgaagaaagtcgacatggctgaggttaaggattggaaagcggttcgtgtggatctggtggtcgctccagatgagcagttcgcctatgcgaaactcggttggacgggcagcggcatgtttcgtcgcgatactcgtcgctacgcggaggaagagcgcgacatgctgctcgacaaccatggtctctacgacctgaaaaagggcatttttctgagtgcggacagcgaagaagagattttcggtcatctggacctggattatctggagccgtgggaacgcaacgcg

SEQ ID NO: 6400 - protein, 394 aa, synthetic construct
  REGION 1..394: note = Variant of terminal deoxynucleotidyl transferase
MHHHHHHGGSGHPEGNTPEKEVPSVIARHVSPYACQRKTTLNNYNKKITDALEIMAENYKFKENLQARLEARRAASVLKSLPFEVTSMKDIQGLPCITDDVRPVIEEIIEVGESSRVKEILNDERYKAFKQFTSVFGVGVKTAEKWYRMGLRTLEHVKASKFLKLNKMQKAGFLYYEDLASGVTKEEKDAVLDIVKETVWTVDPDALVTIVGGFRRGKPQGHDVDLLITIPGRPTDPELLHNVVDLLKKQGLLLYGDIRERTFVEGQLPNPKPDQLDNHQKCFAILKLYRPKVDNSAVGTSKKVDMAEVKDWKAVRVDLVVAPDEQFAYAKLGWTGSGMFRRDTRRYAEEERDMLLDNHGLYDLKKGIFLSADSEEEIFGHLDLDYLEPWERNA

SEQ ID NO: 6401 - DNA, 1182 bp, synthetic construct
  misc_feature 1..1182: note = Variant of terminal deoxynucleotidyl transferase
  source 1..1182: mol_type = other DNA
atgcaccatcatcaccatcacgggggctccggccatccggaaggtaataccccggagaaggaggtgccgagcgttatcgcccgtcatgttagtccgtacgcgtgccagcgcaagaccacgctgaataactacaacaaaaagatcaccgacgcgctggagatcatggccgagaactacaagtttaaagagaacctgcaggcgcgcctggaggcccgtcgcgccgcgagtgtcctgaaaagcctgccgttcgaggttaccagcatgaaagacatccaaggtctgccgtgcattaccgacgacgtacgtcctgtgatcgaagagatcatcgaagtaggcgagagcagccgtgttaaagaaatcctcaatgacgagcgctacaaggcctttaagcagttcaccagcgtgttcggtgtgggcgtcaagaccgcggaaaagtggtaccgtatgggcctccgtacgctgaatgaagtaaaggccagtaagttcctgaagctgaacaagatgcagaaggcgggcttcctgtactacgaggatctggcgagcggtgttacgaaagaagaaaaagatgccgttctggatatcgtgaaggaaacggtgtggactgttgatccggatgcgctggtgaccatcgtgggcggtttccgccgtggcaaacctcagggccacgacgttgacctgctgatcacgattccgggccgtcctacggatccggagctgctccacaacgtggttgatctgctcaagaagcaaggtctgctgctgtacggggacatccgtgagcgtacgttcgtggaggggcaactgccaaatcctaaacctgaccagctggacaatcatcagaagtgcttcgccattctcaagctgtaccgcccgaaggtggataacagtgcggttgggacgtcgaagaaagtcgacatggctgaggttaaggattggaaagcggttcgtgtggatctggtggtcgctccagatgagcagttcgcctatgcgaaactcggttggacgggcagcggcatgtttcgtcgcgatactcgtcgctacgcggaggaagagcgcgacatgctgctcgacaaccatggtctctacgacctgaaaaagggcatttttctgagtgcggacagcgaagaagagattttcggtcatctggacctggattatctggagccgtgggaacgcaacgcg

SEQ ID NO: 6402 - protein, 394 aa, synthetic construct
  REGION 1..394: note = Variant of terminal deoxynucleotidyl transferase
MHHHHHHGGSGHPEGNTPEKEVPSVIARHVSPYACQRKTTLNNYNKKITDALEIMAENYKFKENLQARLEARRAASVLKSLPFEVTSMKDIQGLPCITDDVRPVIEEIIEVGESSRVKEILNDERYKAFKQFTSVFGVGVKTAEKWYRMGLRTLNEVKASKFLKLNKMQKAGFLYYEDLASGVTKEEKDAVLDIVKETVWTVDPDALVTIVGGFRRGKPQGHDVDLLITIPGRPTDPELLHNVVDLLKKQGLLLYGDIRERTFVEGQLPNPKPDQLDNHQKCFAILKLYRPKVDNSAVGTSKKVDMAEVKDWKAVRVDLVVAPDEQFAYAKLGWTGSGMFRRDTRRYAEEERDMLLDNHGLYDLKKGIFLSADSEEEIFGHLDLDYLEPWERNA

SEQ ID NO: 6403 - DNA, 1182 bp, synthetic construct
  misc_feature 1..1182: note = Variant of terminal deoxynucleotidyl transferase
  source 1..1182: mol_type = other DNA
atgcaccatcatcaccatcacgggggctccggccatccggaaggtaataccccggagaaggaggtgccgagcgttatcgcccgtcatgttagtccgtacgcgtgccagcgcaagaccacgctgaataactacaacaaaaagatcaccgacgcgctggagatcatggccgagaactacaagtttaaagagaacctgcaggcgcgcctggaggcccgtcgcgccgcgagtgtcctgaaaagcctgccgttcgaggttaccagcatgaaagacatccaaggtctgccgtgcattaccgacgacgtacgtcctgtgatcgaagagatcatcgaagtaggcgagagcagccgtgttaaagaaatcctcaatgacgagcgctacaaggcctttaagcagttcaccagcgtgttcggtgtgggcgtcaagaccgcggaaaagtggtaccgtatgggcctccgtacgctggaagaagtaaaggccagtaagttcctgaagctgaacaagatgcagaaggcgggcttcctgtactacgaggatctggcgagcggtgttacgaaagaagaaaaagatgccgttctggatatcgtgaaggaaacggtgtggactgttgatccggatgcgctggtgaccatcgtgggcggtttccgccgtggcaaacctcagggccacgacgttgacctgctgatcacgattccgggccgtcctacggatccggagctgctccacaacgtggttgatctgctcaagaagcaaggtctgctgctgtacggggacatccgtgagcgtacgttcgtggaggggcaactgccaaatcctaaacctgaccagctggacaatcatcagaagtgcttcgccattctcaagctgtaccgcccgaaggtggataacagtgcggttgggacgtcgaagaaagtcgacatggctgaggttaaggattggaaagcggttcgtgtggatctggtggtcgctccaaaggagcagttcgcctatgcgaaactcggttggacgggcagcggcatgtttcgtcgcgatactcgtcgctacgcggaggaagagcgcgacatgctgctcgacaaccatggtctctacgacctgaaaaagggcatttttctgagtgcggacagcgaagaagagattttcggtcatctggacctggattatctggagccgtgggaacgcaacgcg

SEQ ID NO: 6404 - protein, 394 aa, synthetic construct
  REGION 1..394: note = Variant of terminal deoxynucleotidyl transferase
MHHHHHHGGSGHPEGNTPEKEVPSVIARHVSPYACQRKTTLNNYNKKITDALEIMAENYKFKENLQARLEARRAASVLKSLPFEVTSMKDIQGLPCITDDVRPVIEEIIEVGESSRVKEILNDERYKAFKQFTSVFGVGVKTAEKWYRMGLRTLEEVKASKFLKLNKMQKAGFLYYEDLASGVTKEEKDAVLDIVKETVWTVDPDALVTIVGGFRRGKPQGHDVDLLITIPGRPTDPELLHNVVDLLKKQGLLLYGDIRERTFVEGQLPNPKPDQLDNHQKCFAILKLYRPKVDNSAVGTSKKVDMAEVKDWKAVRVDLVVAPKEQFAYAKLGWTGSGMFRRDTRRYAEEERDMLLDNHGLYDLKKGIFLSADSEEEIFGHLDLDYLEPWERNA

SEQ ID NO: 6405 - DNA, 1182 bp, synthetic construct
  misc_feature 1..1182: note = Variant of terminal deoxynucleotidyl transferase
  source 1..1182: mol_type = other DNA
atgcaccatcatcaccatcacgggggctccggccatccggaaggtaataccccggagaaggaggtgccgagcgttatcgcccgtcatgttagtccgtacgcgtgccagcgcaagaccacgctgaataactacaacaaaaagatcaccgacgcgctggagatcatggccgagaactacaagtttaaagagaacacgcaggcgcgcctggaggcccgtcgcgccgcgagtgtcctgaaaagcctgccgttcgaggttaccagcatgaaagacatccaaggtctgccgtgcattaccgacgacgtacgtcctgtgatcgaagagatcatcgaagtaggcgagagcagccgtgttaaagaaatcctcaatgacgagcgctacaaggcctttaagcagttcaccagcgtgttcggtgtgggcgtcaagaccgcggaaaagtggtaccgtatgggcctccgtacgctggaagaagtaaaggccagtaagttcctgaagctgaacaagatgcagaaggcgggcttcctgtactacgaggatctggcgagcggtgttacgaaagaagaaaaagatgccgttctggatatcgtgaaggaaacggtgtggactgttgatccggatgcgctggtgaccatcgtgggcggtttccgccgtggcaaacctcagggccacgacgttgacctgctgatcacgattccgggccgtcctacggatccggagctgctccacaacgtggttgatctgctcaagaagcaaggtctgctgctgtacggggacatccgtgagcgtacgttcgtggaggggcaactgccaaatcctaaacctgaccagctggacaatcatcagaagtgcttcgccattctcaagctgtaccgcccgaaggtggataacagtgcggttgggacgtcgaagaaagtcgacatggctgaggttaaggattggaaagcggttcgtgtggatctggtggtcgctccagatgagcagttcgcctatgcgaaactcggttggacgggcagcggcatgtttcgtcgcgatactcgtcgctacgcggaggaagagcgcgacatgctgctcgacaaccatggtctctacgacctgaaaaagggcatttttctgagtgcggacagcgaagaagagattttcggtcatctggacctggattatctggagccgtgggaacgcaacgcg

SEQ ID NO: 6406 - protein, 394 aa, synthetic construct
  REGION 1..394: note = Variant of terminal deoxynucleotidyl transferase
MHHHHHHGGSGHPEGNTPEKEVPSVIARHVSPYACQRKTTLNNYNKKITDALEIMAENYKFKENTQARLEARRAASVLKSLPFEVTSMKDIQGLPCITDDVRPVIEEIIEVGESSRVKEILNDERYKAFKQFTSVFGVGVKTAEKWYRMGLRTLEEVKASKFLKLNKMQKAGFLYYEDLASGVTKEEKDAVLDIVKETVWTVDPDALVTIVGGFRRGKPQGHDVDLLITIPGRPTDPELLHNVVDLLKKQGLLLYGDIRERTFVEGQLPNPKPDQLDNHQKCFAILKLYRPKVDNSAVGTSKKVDMAEVKDWKAVRVDLVVAPDEQFAYAKLGWTGSGMFRRDTRRYAEEERDMLLDNHGLYDLKKGIFLSADSEEEIFGHLDLDYLEPWERNA

SEQ ID NO: 6407 - DNA, 1182 bp, synthetic construct
  misc_feature 1..1182: note = Variant of terminal deoxynucleotidyl transferase
  source 1..1182: mol_type = other DNA
atgcaccatcatcaccatcacgggggctccggccatccggaaggtaataccccggagaaggaggtgccgagcgttatcgcccgtcatgttagtccgtacgcgtgccagcgcaagaccacgctgaataactacaacaaaaagatcaccgacgcgctggagatcatggccgagaactacaagtttaaagagaacctgcaggcgcgcctggaggcccgtcgcgccagtagtgtcctgaaaagcctgccgttcgaggttaccagcatgaaagacatccaaggtctgccgtgcattaccgacgacgtacgtcctgtgatcgaagagatcatcgaagtaggcgagagcagccgtgttaaagaaatcctcaatgacgagcgctacaaggcctttaagcagttcaccagcgtgttcggtgtgggcgtcaagaccgcggaaaagtggtaccgtatgggcctccgtacgctggaagaagtaaaggccagtaagttcctgaagctgaacaagatgcagaaggcgggcttcctgtactacgaggatctggcgagcggtgttacgaaagaagaaaaagatgccgttctggatatcgtgaaggaaacggtgtggactgttgatccggatgcgctggtgaccatcgtgggcggtttccgccgtggcaaacctcagggccacgacgttgacctgctgatcacgattccgggccgtcctacggatccggagctgctccacaacgtggttgatctgctcaagaagcaaggtctgctgctgtacggggacatccgtgagcgtacgttcgtggaggggcaactgccaaatcctaaacctgaccagctggacaatcatcagaagtgcttcgccattctcaagctgtaccgcccgaaggtggataacagtgcggttgggacgtcgaagaaagtcgacatggctgaggttaaggattggaaagcggttcgtgtggatctggtggtcgctccagatgagcagttcgcctatgcgaaactcggttggacgggcagcggcatgtttcgtcgcgatactcgtcgctacgcggaggaagagcgcgacatgctgctcgacaaccatggtctctacgacctgaaaaagggcatttttctgagtgcggacagcgaagaagagattttcggtcatctggacctggattatctggagccgtgggaacgcaacgcg

SEQ ID NO: 6408 - protein, 394 aa, synthetic construct
  REGION 1..394: note = Variant of terminal deoxynucleotidyl transferase
MHHHHHHGGSGHPEGNTPEKEVPSVIARHVSPYACQRKTTLNNYNKKITDALEIMAENYKFKENLQARLEARRASSVLKSLPFEVTSMKDIQGLPCITDDVRPVIEEIIEVGESSRVKEILNDERYKAFKQFTSVFGVGVKTAEKWYRMGLRTLEEVKASKFLKLNKMQKAGFLYYEDLASGVTKEEKDAVLDIVKETVWTVDPDALVTIVGGFRRGKPQGHDVDLLITIPGRPTDPELLHNVVDLLKKQGLLLYGDIRERTFVEGQLPNPKPDQLDNHQKCFAILKLYRPKVDNSAVGTSKKVDMAEVKDWKAVRVDLVVAPDEQFAYAKLGWTGSGMFRRDTRRYAEEERDMLLDNHGLYDLKKGIFLSADSEEEIFGHLDLDYLEPWERNA

SEQ ID NO: 6409 - DNA, 1182 bp, synthetic construct
  misc_feature 1..1182: note = Variant of terminal deoxynucleotidyl transferase
  source 1..1182: mol_type = other DNA
atgcaccatcatcaccatcacgggggctccggccatccggaaggtaataccccggagaaggaggtgccgagcgttatcgcccgtcatgttagtccgtacgcgtgccagcgcaagaccacgctgaataactacaacaaaaagatcaccgacgcgctggagatcatggccgagaactacaagtttaaagagaacctgcaggcgcgcctggaggcccgtcgcgccgcgagtgtcctgaaaagcctgccgttcgaggttaccagcatgaaagacatccaaggtctgccgtgcattaccgacgacgtacgtcctgtgatcgaagagatcatcgaagtaggcgagagcagccgtgttaaagaaatcctcaatgacgagcgctacaagacgtttaagcagttcaccagcgtgttcggtgtgggcgtcaagaccgcggaaaagtggtaccgtatgggcctccgtacgctggaagaagtaaaggccagtaagttcctgaagctgaacaagatgcagaaggcgggcttcctgtactacgaggatctggcgagcggtgttacgaaagaagaaaaagatgccgttctggatatcgtgaaggaaacggtgtggactgttgatccggatgcgctggtgaccatcgtgggcggtttccgccgtggcaaacctcagggccacgacgttgacctgctgatcacgattccgggccgtcctacggatccggagctgctccacaacgtggttgatctgctcaagaagcaaggtctgctgctgtacggggacatccgtgagcgtacgttcgtggaggggcaactgccaaatcctaaacctgaccagctggacaatcatcagaagtgcttcgccattctcaagctgtaccgcccgaaggtggataacagtgcggttgggacgtcgaagaaagtcgacatggctgaggttaaggattggaaagcggttcgtgtggatctggtggtcgctccagatgagcagttcgcctatgcgaaactcggttggacgggcagcggcatgtttcgtcgcgatactcgtcgctacgcggaggaagagcgcgacatgctgctcgacaaccatggtctctacgacctgaaaaagggcatttttctgagtgcggacagcgaagaagagattttcggtcatctggacctggattatctggagccgtgggaacgcaacgcg

SEQ ID NO: 6410 - protein, 394 aa, synthetic construct
  REGION 1..394: note = Variant of terminal deoxynucleotidyl transferase
MHHHHHHGGSGHPEGNTPEKEVPSVIARHVSPYACQRKTTLNNYNKKITDALEIMAENYKFKENLQARLEARRAASVLKSLPFEVTSMKDIQGLPCITDDVRPVIEEIIEVGESSRVKEILNDERYKTFKQFTSVFGVGVKTAEKWYRMGLRTLEEVKASKFLKLNKMQKAGFLYYEDLASGVTKEEKDAVLDIVKETVWTVDPDALVTIVGGFRRGKPQGHDVDLLITIPGRPTDPELLHNVVDLLKKQGLLLYGDIRERTFVEGQLPNPKPDQLDNHQKCFAILKLYRPKVDNSAVGTSKKVDMAEVKDWKAVRVDLVVAPDEQFAYAKLGWTGSGMFRRDTRRYAEEERDMLLDNHGLYDLKKGIFLSADSEEEIFGHLDLDYLEPWERNA

SEQ ID NO: 6411 - DNA, 1182 bp, synthetic construct
  misc_feature 1..1182: note = Variant of terminal deoxynucleotidyl transferase
  source 1..1182: mol_type = other DNA
atgcaccatcatcaccatcacgggggctccggccatccggaaggtaataccccggagaaggaggtgccgagcgttatcgcccgtcatgttagtccgtacgcgtgccagcgcaagaccacgctgaataactacaacaaaaagatcaccgacgcgctggagatcatggccgagaactacaagtttaaagagaacctgcaggcgcgcctggaggcccgtcgcgccgcgagtgtcctgaaaagcctgccgttcgaggttaccagcatgaaagacatccaaggtctgccgtgcattaccgacgacgtacgtcctgtgatcgaagagatcatcgaagtaggcgagagcagccgtgttaaagaaatcctcaatgacgagcgctacaaggcctttaagcagttcaccagcgtgttcggtgtgggcgtcaagaccgcggaaaagtggtaccgtatgggcattcgtacgctggaagaagtaaaggccagtaagttcctgaagctgaacaagatgcagaaggcgggcttcctgtactacgaggatctggcgagcggtgttacgaaagaagaaaaagatgccgttctggatatcgtgaaggaaacggtgtggactgttgatccggatgcgctggtgaccatcgtgggcggtttccgccgtggcaaacctcagggccacgacgttgacctgctgatcacgattccgggccgtcctacggatccggagctgctccacaacgtggttgatctgctcaagaagcaaggtctgctgctgtacggggacatccgtgagcgtacgttcgtggaggggcaactgccaaatcctaaacctgaccagctggacaatcatcagaagtgcttcgccattctcaagctgtaccgcccgaaggtggataacagtgcggttgggacgtcgaagaaagtcgacatggctgaggttaaggattggaaagcggttcgtgtggatctggtggtcgctccagatgagcagttcgcctatgcgaaactcggttggacgggcagcggcatgtttcgtcgcgatactcgtcgctacgcggaggaagagcgcgacatgctgctcgacaaccatggtctctacgacctgaaaaagggcatttttctgagtgcggacagcgaagaagagattttcggtcatctggacctggattatctggagccgtgggaacgcaacgcg

SEQ ID NO: 6412 - protein, 394 aa, synthetic construct
  REGION 1..394: note = Variant of terminal deoxynucleotidyl transferase
MHHHHHHGGSGHPEGNTPEKEVPSVIARHVSPYACQRKTTLNNYNKKITDALEIMAENYKFKENLQARLEARRAASVLKSLPFEVTSMKDIQGLPCITDDVRPVIEEIIEVGESSRVKEILNDERYKAFKQFTSVFGVGVKTAEKWYRMGIRTLEEVKASKFLKLNKMQKAGFLYYEDLASGVTKEEKDAVLDIVKETVWTVDPDALVTIVGGFRRGKPQGHDVDLLITIPGRPTDPELLHNVVDLLKKQGLLLYGDIRERTFVEGQLPNPKPDQLDNHQKCFAILKLYRPKVDNSAVGTSKKVDMAEVKDWKAVRVDLVVAPDEQFAYAKLGWTGSGMFRRDTRRYAEEERDMLLDNHGLYDLKKGIFLSADSEEEIFGHLDLDYLEPWERNA

SEQ ID NO: 6413 - DNA, 1182 bp, synthetic construct
  misc_feature 1..1182: note = Variant of terminal deoxynucleotidyl transferase
  source 1..1182: mol_type = other DNA
atgcaccatcatcaccatcacgggggctccggccatccggaaggtaataccccggagaaggaggtgccgagcgttatcgcccgtcatgttagtccgtacgcgtgccagcgcaagaccacgctgaataactacaacaaaaagatcaccgacgcgctggagatcatggccgagaactacaagtttaaagagaacctgcaggcgcgcctggaggcccgtcgcgccgcgagtgtcctgaaaagcctgccgttcgaggttaccagcatgaaagacatccaaggtctgccgtgcattaccgacgacgtacgtcctgtgatcgaagagatcatcgaagtaggcgagagcagccgtgttaaagaaatcctcaatgacgagcgctacaaggcctttaagcagttcaccagcgtgttcggtgtgggcgtcaagaccgcggaaaagtggtaccgtatgggcctccgtacgctggaagaagtaaaggccagtaagttcctgaagctgaacaagatgcagaaggcgggcttcctgtactacgaggatctggcgagcggtgttacgaaagaagaaaaagatgccgttctggatatcgtgaaggaaacggtgtggactgttgatccggatgcgctggtgtctatcgccggcggtttccgccgtggcaaacctcagggccacgacgttgacctgctgatcacgattccgggccgtcctacggatccggagctgctccacaacgtggttgatctgctcaagaagcaaggtctgctgctgtacggggacatccgtgagcgtacgttcgtggaggggcaactgccaaatcctaaacctgaccagctggacaatcatcagaagtgcttcgccattctcaagctgtaccgcccgaaggtggataacagtgcggttgggacgtcgaagaaagtcgacatggctgaggttaaggattggaaagcggttcgtgtggatctggtggtcgctccagatgagcagttcgcctatgcgaaactcggttggacgggcagcggcatgtttcgtcgcgatactcgtcgctacgcggaggaagagcgcgacatgctgctcgacaaccatggtctctacgacctgaaaaagggcatttttctgagtgcggacagcgaagaagagattttcggtcatctggacctggattatctggagccgtgggaacgcaacgcg

SEQ ID NO: 6414 - protein, 394 aa, synthetic construct
  REGION 1..394: note = Variant of terminal deoxynucleotidyl transferase
MHHHHHHGGSGHPEGNTPEKEVPSVIARHVSPYACQRKTTLNNYNKKITDALEIMAENYKFKENLQARLEARRAASVLKSLPFEVTSMKDIQGLPCITDDVRPVIEEIIEVGESSRVKEILNDERYKAFKQFTSVFGVGVKTAEKWYRMGLRTLEEVKASKFLKLNKMQKAGFLYYEDLASGVTKEEKDAVLDIVKETVWTVDPDALVSIAGGFRRGKPQGHDVDLLITIPGRPTDPELLHNVVDLLKKQGLLLYGDIRERTFVEGQLPNPKPDQLDNHQKCFAILKLYRPKVDNSAVGTSKKVDMAEVKDWKAVRVDLVVAPDEQFAYAKLGWTGSGMFRRDTRRYAEEERDMLLDNHGLYDLKKGIFLSADSEEEIFGHLDLDYLEPWERNA

SEQ ID NO: 6415 - DNA, 1182 bp, synthetic construct
  misc_feature 1..1182: note = Variant of terminal deoxynucleotidyl transferase
  source 1..1182: mol_type = other DNA
atgcaccatcatcaccatcacgggggctccggccatccggaaggtaataccccggagaaggaggtgccgagcgttatcgcccgtcatgttagtccgtacgcgtgccagcgcaagaccacgctgaataactacaacaaaaagatcaccgacgcgctggagatcatggccgagaactacaagtttaaagagaacctgcaggcgcgcctggaggcccgtcgcgccgcgagtgtcctgaaaagcctgccgttcgaggttaccagcatgaaagacatccaaggtctgccgtgcattaccgacgacgtacgtcctgtgatcgaagagatcatcgaagtaggcgagagcagccgtgttaaagaaatcctcaatgacgagcgctacaaggcctttaagcagttcaccagcgtgttcggtgtgggcgtcaagaccgcggaaaagtggtaccgtatgggcccgcgtacgctggaagaagtaaaggccagtaagttcctgaagctgaacaagatgcagaaggcgggcttcctgtactacgaggatctggcgagcggtgttacgaaagaagaaaaagatgccgttctggatatcgtgaaggaaacggtgtggactgttgatccggatgcgctggtgaccatcgtgggcggtttccgccgtggcaaacctcagggccacgacgttgacctgctgatcacgattccgggccgtcctacggatccggagctgctccacaacgtggttgatctgctcaagaagcaaggtctgctgctgtacggggacatccgtgagcgtacgttcgtggaggggcaactgccaaatcctaaacctgaccagctggacaatcatcagaagtgcttcgccattctcaagctgtaccgcccgaaggtggataacagtgcggttgggacgtcgaagaaagtcgacatggctgaggttaaggattggaaagcggttcgtgtggatctggtggtcgctccagatgagcagttcgcctatgcgaaactcggttggacgggcagcggcatgtttcgtcgcgatactcgtcgctacgcggaggaagagcgcgacatgctgctcgacaaccatggtctctacgacctgaaaaagggcatttttctgagtgcggacagcgaagaagagattttcggtcatctggacctggattatctggagccgtgggaacgcaacgcg

SEQ ID NO: 6416 - protein, 394 aa, synthetic construct
  REGION 1..394: note = Variant of terminal deoxynucleotidyl transferase
MHHHHHHGGSGHPEGNTPEKEVPSVIARHVSPYACQRKTTLNNYNKKITDALEIMAENYKFKENLQARLEARRAASVLKSLPFEVTSMKDIQGLPCITDDVRPVIEEIIEVGESSRVKEILNDERYKAFKQFTSVFGVGVKTAEKWYRMGPRTLEEVKASKFLKLNKMQKAGFLYYEDLASGVTKEEKDAVLDIVKETVWTVDPDALVTIVGGFRRGKPQGHDVDLLITIPGRPTDPELLHNVVDLLKKQGLLLYGDIRERTFVEGQLPNPKPDQLDNHQKCFAILKLYRPKVDNSAVGTSKKVDMAEVKDWKAVRVDLVVAPDEQFAYAKLGWTGSGMFRRDTRRYAEEERDMLLDNHGLYDLKKGIFLSADSEEEIFGHLDLDYLEPWERNA

SEQ ID NO: 6417 - DNA, 1182 bp, synthetic construct
  misc_feature 1..1182: note = Variant of terminal deoxynucleotidyl transferase
  source 1..1182: mol_type = other DNA
atgcaccatcatcaccatcacgggggctccggccatccggaaggtaataccccggagaaggaggtgccgagcgttatcgcccgtcatgttagtccgtacgcgtgccagcgcaagaccacgctgaataactacaacaaaaagatcaccgacgcgctggagatcatggccgagaactacaagtttaaagagaacctgcaggcgcgcctggaggcccgtcgcgccgcgagtgtcctgaaaagcctgccgttcgaggttaccagcatgaaagacatccaaggtctgccgtgcattaccgacgacgtacgtcctgtgatcgaagagatcatcgaagtaggcgagagcagccgtgttaaagaaatcctcaatgacgagcgctacaaggcctttaagcagttcaccagcgtgttcggtgtgggcgtcaagaccgcggaaaagtggtaccgtatgggcctccgtacgctggaagaagtaaagcatagtaagttcctgaagctgaacaagatgcagaaggcgggcttcctgtactacgaggatctggcgagcggtgttacgaaagaagaaaaagatgccgttctggatatcgtgaaggaaacggtgtggactgttgatccggatgcgctggtgaccatcgtgggcggtttccgccgtggcaaacctcagggccacgacgttgacctgctgatcacgattccgggccgtcctacggatccggagctgctccacaacgtggttgatctgctcaagaagcaaggtctgctgctgtacggggacatccgtgagcgtacgttcgtggaggggcaactgccaaatcctaaacctgaccagctggacaatcatcagaagtgcttcgccattctcaagctgtaccgcccgaaggtggataacagtgcggttgggacgtcgaagaaagtcgacatggctgaggttaaggattggaaagcggttcgtgtggatctggtggtcgctccagatgagcagttcgcctatgcgaaactcggttggacgggcagcggcatgtttcgtcgcgatactcgtcgctacgcggaggaagagcgcgacatgctgctcgacaaccatggtctctacgacctgaaaaagggcatttttctgagtgcggacagcgaagaagagattttcggtcatctggacctggattatctggagccgtgggaacgcaacgcg

SEQ ID NO: 6418 - protein, 394 aa, synthetic construct
  REGION 1..394: note = Variant of terminal deoxynucleotidyl transferase
MHHHHHHGGSGHPEGNTPEKEVPSVIARHVSPYACQRKTTLNNYNKKITDALEIMAENYKFKENLQARLEARRAASVLKSLPFEVTSMKDIQGLPCITDDVRPVIEEIIEVGESSRVKEILNDERYKAFKQFTSVFGVGVKTAEKWYRMGLRTLEEVKHSKFLKLNKMQKAGFLYYEDLASGVTKEEKDAVLDIVKETVWTVDPDALVTIVGGFRRGKPQGHDVDLLITIPGRPTDPELLHNVVDLLKKQGLLLYGDIRERTFVEGQLPNPKPDQLDNHQKCFAILKLYRPKVDNSAVGTSKKVDMAEVKDWKAVRVDLVVAPDEQFAYAKLGWTGSGMFRRDTRRYAEEERDMLLDNHGLYDLKKGIFLSADSEEEIFGHLDLDYLEPWERNA

SEQ ID NO: 6419 - DNA, 1182 bp, synthetic construct
  misc_feature 1..1182: note = Variant of terminal deoxynucleotidyl transferase
  source 1..1182: mol_type = other DNA
atgcaccatcatcaccatcacgggggctccggccatccggaaggtaataccccggagaaggaggtgccgagcgttatcgcccgtcatgttagtccgtacgcgtgccagcgcaagaccacgctgaataactacaacaaaaagatcaccgacgcgctggagatcatggccgagaactacaagtataaagagaacctgcaggcgcgcctggaggcccgtcgcgccgcgagtgtcctgaaaagcctgccgttcgaggttaccagcatgaaagacatccaaggtctgccgtgcattaccgacgacgtacgtcctgtgatcgaagagatcatcgaagtaggcgagagcagccgtgttaaagaaatcctcaatgacgagcgctacaaggcctttaagcagttcaccagcgtgttcggtgtgggcgtcaagaccgcggaaaagtggtaccgtatgggcctccgtacgctggaagaagtaaaggccagtaagttcctgaagctgaacaagatgcagaaggcgggcttcctgtactacgaggatctggcgagcggtgttacgaaagaagaaaaagatgccgttctggatatcgtgaaggaaacggtgtggactgttgatccggatgcgctggtgaccatcgtgggcggtttccgccgtggcaaacctcagggccacgacgttgacctgctgatcacgattccgggccgtcctacggatccggagctgctccacaacgtggttgatctgctcaagaagcaaggtctgctgctgtacggggacatccgtgagcgtacgttcgtggaggggcaactgccaaatcctaaacctgaccagctggacaatcatcagaagtgcttcgccattctcaagctgtaccgcccgaaggtggataacagtgcggttgggacgtcgaagaaagtcgacatggctgaggttaaggattggaaagcggttcgtgtggatctggtggtcgctccagatgagcagttcgcctatgcgaaactcggttggacgggcagcggcatgtttcgtcgcgatactcgtcgctacgcggaggaagagcgcgacatgctgctcgacaaccatggtctctacgacctgaaaaagggcatttttctgagtgcggacagcgaagaagagattttcggtcatctggacctggattatctggagccgtgggaacgcaacgcg

SEQ ID NO: 6420 - protein, 394 aa, synthetic construct
  REGION 1..394: note = Variant of terminal deoxynucleotidyl transferase
MHHHHHHGGSGHPEGNTPEKEVPSVIARHVSPYACQRKTTLNNYNKKITDALEIMAENYKYKENLQARLEARRAASVLKSLPFEVTSMKDIQGLPCITDDVRPVIEEIIEVGESSRVKEILNDERYKAFKQFTSVFGVGVKTAEKWYRMGLRTLEEVKASKFLKLNKMQKAGFLYYEDLASGVTKEEKDAVLDIVKETVWTVDPDALVTIVGGFRRGKPQGHDVDLLITIPGRPTDPELLHNVVDLLKKQGLLLYGDIRERTFVEGQLPNPKPDQLDNHQKCFAILKLYRPKVDNSAVGTSKKVDMAEVKDWKAVRVDLVVAPDEQFAYAKLGWTGSGMFRRDTRRYAEEERDMLLDNHGLYDLKKGIFLSADSEEEIFGHLDLDYLEPWERNA

SEQ ID NO: 6421 - DNA, 1182 bp, synthetic construct
  misc_feature 1..1182: note = Variant of terminal deoxynucleotidyl transferase
  source 1..1182: mol_type = other DNA
atgcaccatcatcaccatcacgggggctccggccatccggaaggtaataccccggagaaggaggtgccgagcgttatcgcccgtcatgttagtccgtacgcgtgccagcgcaagaccacgctgaataactacaacaaaaagatcaccgacgcgctggagatcatggccgagaactacaagtttaaagagaacctgcaggcgcgcctggaggcccgtcgcgccgcgagtgtcctgaaaagcctgccgttcgaggttaccagcatgaaagacatccaaggtctgccgtgcattaccgacgacgtacgtcctgtgatcgaagagatcatcgaagtaggcgagagcagccgtgttaaagaaatcctcaatgacgagcgctacaaggcctttaagcagttcaccagcgtgttcggtgtgggcgtcaagaccgcggaaaagtggtaccgtatgggcctccgtacgctggaagaagtaaaggccagtaagttcctgaagctgaacaagatgcagaaggcgggcttcctgtactacgaggatctggcgagcggtgttacgaaagaagaaaaagatgccgttctggatatcgtgaaggaaacggtgtggactgttgatccggatgcgctggtgaccatcgtgggcggtttccgccgtggcaaacctcagggccacgacgttgacctgctgatcacgattccgggccgtcctacggatccggagctgctccacaacgtggttgatctgctcaagaagcaaggtctgctgctgtacggggacatccgtgagcgtacgttcgtggaggggcaactgccaaatcctaaacctgaccagctggactctcatcagaagtgcttcgccattctcaagctgtaccgcccgaaggtggataacagtgcggttgggacgtcgaagaaagtcgacatggctgaggttaaggattggaaagcggttcgtgtggatctggtggtcgctccagatgagcagttcgcctatgcgaaactcggttggacgggcagcggcatgtttcgtcgcgatactcgtcgctacgcggaggaagagcgcgacatgctgctcgacaaccatggtctctacgacctgaaaaagggcatttttctgagtgcggacagcgaagaagagattttcggtcatctggacctggattatctggagccgtgggaacgcaacgcg

SEQ ID NO: 6422 - protein, 394 aa, synthetic construct
  REGION 1..394: note = Variant of terminal deoxynucleotidyl transferase
MHHHHHHGGSGHPEGNTPEKEVPSVIARHVSPYACQRKTTLNNYNKKITDALEIMAENYKFKENLQARLEARRAASVLKSLPFEVTSMKDIQGLPCITDDVRPVIEEIIEVGESSRVKEILNDERYKAFKQFTSVFGVGVKTAEKWYRMGLRTLEEVKASKFLKLNKMQKAGFLYYEDLASGVTKEEKDAVLDIVKETVWTVDPDALVTIVGGFRRGKPQGHDVDLLITIPGRPTDPELLHNVVDLLKKQGLLLYGDIRERTFVEGQLPNPKPDQLDSHQKCFAILKLYRPKVDNSAVGTSKKVDMAEVKDWKAVRVDLVVAPDEQFAYAKLGWTGSGMFRRDTRRYAEEERDMLLDNHGLYDLKKGIFLSADSEEEIFGHLDLDYLEPWERNA

SEQ ID NO: 6423 - DNA, 1182 bp, synthetic construct
  misc_feature 1..1182: note = Variant of terminal deoxynucleotidyl transferase
  source 1..1182: mol_type = other DNA
atgcaccatcatcaccatcacgggggctccggccatccggaaggtaataccccggagaaggaggtgccgagcgttatcgcccgtcatgttagtccgtacgcgtgccagcgcaagaccacgctgaataactacaacaaaaagatcaccgacgcgctggaaatcatggccgctaactacaagtttaaagagaacctgcaggcgcgcctggaggcccgtcgcgccgcgagtgtcctgaaaagcctgccgttcgaggttaccagcatgaaagacatccaaggtctgccgtgcattaccgacgacgtacgtcctgtgatcgaagagatcatcgaagtaggcgagagcagccgtgttaaagaaatcctcaatgacgagcgctacaaggcctttaagcagttcaccagcgtgttcggtgtgggcgtcaagaccgcggaaaagtggtaccgtatgggcctccgtacgctggaagaagtaaaggccagtaagttcctgaagctgaacaagatgcagaaggcgggcttcctgtactacgaggatctggcgagcggtgttacgaaagaagaaaaagatgccgttctggatatcgtgaaggaaacggtgtggactgttgatccggatgcgctggtgaccatcgtgggcggtttccgccgtggcaaacctcagggccacgacgttgacctgctgatcacgattccgggccgtcctacggatccggagctgctccacaacgtggttgatctgctcaagaagcaaggtctgctgctgtacggggacatccgtgagcgtacgttcgtggaggggcaactgccaaatcctaaacctgaccagctggacaatcatcagaagtgcttcgccattctcaagctgtaccgcccgaaggtggataacagtgcggttgggacgtcgaagaaagtcgacatggctgaggttaaggattggaaagcggttcgtgtggatctggtggtcgctccagatgagcagttcgcctatgcgaaactcggttggacgggcagcggcatgtttcgtcgcgatactcgtcgctacgcggaggaagagcgcgacatgctgctcgacaaccatggtctctacgacctgaaaaagggcatttttctgagtgcggacagcgaagaagagattttcggtcatctggacctggattatctggagccgtgggaacgcaacgcg

SEQ ID NO: 6424 - protein, 394 aa, synthetic construct
  REGION 1..394: note = Variant of terminal deoxynucleotidyl transferase
MHHHHHHGGSGHPEGNTPEKEVPSVIARHVSPYACQRKTTLNNYNKKITDALEIMAANYKFKENLQARLEARRAASVLKSLPFEVTSMKDIQGLPCITDDVRPVIEEIIEVGESSRVKEILNDERYKAFKQFTSVFGVGVKTAEKWYRMGLRTLEEVKASKFLKLNKMQKAGFLYYEDLASGVTKEEKDAVLDIVKETVWTVDPDALVTIVGGFRRGKPQGHDVDLLITIPGRPTDPELLHNVVDLLKKQGLLLYGDIRERTFVEGQLPNPKPDQLDNHQKCFAILKLYRPKVDNSAVGTSKKVDMAEVKDWKAVRVDLVVAPDEQFAYAKLGWTGSGMFRRDTRRYAEEERDMLLDNHGLYDLKKGIFLSADSEEEIFGHLDLDYLEPWERNA

SEQ ID NO: 6425 - DNA, 1182 bp, synthetic construct
  misc_feature 1..1182: note = Variant of terminal deoxynucleotidyl transferase
  source 1..1182: mol_type = other DNA
atgcaccatcatcaccatcacgggggctccggccatccggaaggtaataccccggagaaggaggtgccgagcgttatcgcccgtcatgttagtccgtacgcgtgccagcgcaagaccacgctgaataactacaacaaaaagatcaccgacgcgctggagatcatggccgagaactacaagtttaaagagaacctgcaggcgcgcctggaggcccgtcgcgccgcgagtgtcctgaaaagcctgccgttcgaggttaccagcatgaaagacatccaaggtctgccgtgcattaccgacgacgtacgtcctgtgatcgaagagatcatcgaagtaggcgagagcagccgtgttaaagaaatcctcaatgacgagcgctacaaggcctttaagcagttcaccagcgtgttcggtgtgggcgtcaagaccgcggaaaagtggtaccgtatgggcctccgtacgctggaagaagtaaaggccagtaagttcctgaagctgaacaagatgcagaaggcgggcttcctgtactacgaggatctggcgagcggtgttacgaaagaagaaaaagatgccgttctggatatcgtgaaggaaacggtgtggactgttgatccggatgcgctggtgaccatcgtgggcggtttccgccgtggcaaacctcagggccacgacgttgacctgctgatcacgattccgggccgtcctacggatccggagctgctccacaacgtggttgatctgctcaagaagcaaggtctgctgctgtacggggacatccgtgagcgtacgttcgtggaggggcaactgccaaatcctaaacctgaccagctggacaatcatcagaagtgcttcgccattctcaagctgtaccgcccgaaggtggataacagtgcggttgggacgtcgaagaaagtcgacatggctgaggttaaggattggaaagcggttcgtgtggatctggtggtcgctccagatgagcagttcgcctatgcgaaactcggttggacgggcagcggcatgtttcgtcgcgatactcgtcgctacgcggaggaagagcgcgacatgctgctcgacaaccatggtctctacgacctgaaaaagggcatttttctgagtgcggacagcgaagaagagattttcggtcttctggacctggattatctggagccgtgggaacgcaacgcg

SEQ ID NO: 6426 - protein, 394 aa, synthetic construct
  REGION 1..394: note = Variant of terminal deoxynucleotidyl transferase
MHHHHHHGGSGHPEGNTPEKEVPSVIARHVSPYACQRKTTLNNYNKKITDALEIMAENYKFKENLQARLEARRAASVLKSLPFEVTSMKDIQGLPCITDDVRPVIEEIIEVGESSRVKEILNDERYKAFKQFTSVFGVGVKTAEKWYRMGLRTLEEVKASKFLKLNKMQKAGFLYYEDLASGVTKEEKDAVLDIVKETVWTVDPDALVTIVGGFRRGKPQGHDVDLLITIPGRPTDPELLHNVVDLLKKQGLLLYGDIRERTFVEGQLPNPKPDQLDNHQKCFAILKLYRPKVDNSAVGTSKKVDMAEVKDWKAVRVDLVVAPDEQFAYAKLGWTGSGMFRRDTRRYAEEERDMLLDNHGLYDLKKGIFLSADSEEEIFGLLDLDYLEPWERNA

SEQ ID NO: 6427 - DNA, 1182 bp, synthetic construct
  misc_feature 1..1182: note = Variant of terminal deoxynucleotidyl transferase
  source 1..1182: mol_type = other DNA
atgcaccatcatcaccatcacgggggctccggccatccggaaggtaataccccggagaaggaggtgccgagcgttatcgcccgtcatgttagtccgtacgcgtgccagcgcaagaccacgctgaataactacaacaaaaagatcaccgacgcgctggagatcatggccgagaactacaagtttaaagagaacctgcaggcgcgcctggaggcccgtcgcgccgcgagtgtcctgaaaagcctgccgttcgaggttaccagcatgaaagacatccaaggtctgccgtgcattaccgacgacgtacgtcctgtgatcgaagagatcatcgaagtaggcgagagcagccgtgttaaagaaatcctcaatgacgagcgctacaaggcctttaagcagttcaccagcgtgttcggtgtgggcgtcaagaccgcggaaaagtggtaccgtatgggcctccgtacgctgtctgaagtaaaggccagtaagttcctgaagctgaacaagatgcagaaggcgggcttcctgtactacgaggatctggcgagcggtgttacgaaagaagaaaaagatgccgttctggatatcgtgaaggaaacggtgtggactgttgatccggatgcgctggtgaccatcgtgggcggtttccgccgtggcaaacctcagggccacgacgttgacctgctgatcacgattccgggccgtcctacggatccggagctgctccacaacgtggttgatctgctcaagaagcaaggtctgctgctgtacggggacatccgtgagcgtacgttcgtggaggggcaactgccaaatcctaaacctgaccagctggacaatcatcagaagtgcttcgccattctcaagctgtaccgcccgaaggtggataacagtgcggttgggacgtcgaagaaagtcgacatggctgaggttaaggattggaaagcggttcgtgtggatctggtggtcgctccagatgagcagttcgcctatgcgaaactcggttggacgggcagcggcatgtttcgtcgcgatactcgtcgctacgcggaggaagagcgcgacatgctgctcgacaaccatggtctctacgacctgaaaaagggcatttttctgagtgcggacagcgaagaagagattttcggtcatctggacctggattatctggagccgtgggaacgcaacgcg

SEQ ID NO: 6428 - protein, 394 aa, synthetic construct
  REGION 1..394: note = Variant of terminal deoxynucleotidyl transferase
MHHHHHHGGSGHPEGNTPEKEVPSVIARHVSPYACQRKTTLNNYNKKITDALEIMAENYKFKENLQARLEARRAASVLKSLPFEVTSMKDIQGLPCITDDVRPVIEEIIEVGESSRVKEILNDERYKAFKQFTSVFGVGVKTAEKWYRMGLRTLSEVKASKFLKLNKMQKAGFLYYEDLASGVTKEEKDAVLDIVKETVWTVDPDALVTIVGGFRRGKPQGHDVDLLITIPGRPTDPELLHNVVDLLKKQGLLLYGDIRERTFVEGQLPNPKPDQLDNHQKCFAILKLYRPKVDNSAVGTSKKVDMAEVKDWKAVRVDLVVAPDEQFAYAKLGWTGSGMFRRDTRRYAEEERDMLLDNHGLYDLKKGIFLSADSEEEIFGHLDLDYLEPWERNA

SEQ ID NO: 6429 - DNA, 1182 bp, synthetic construct
  misc_feature 1..1182: note = Variant of terminal deoxynucleotidyl transferase
  source 1..1182: mol_type = other DNA
atgcaccatcatcaccatcacgggggctccggccatccggaaggtaataccccggagaaggaggtgccgagcgttatcgcccgtcatgttagtccgtacgcgtgccagcgcaagaccacgctgaataactacaacaaaaagatcaccgacgcgctggagatcatggccgagaactacaagtttaaagagaacctgcaggcgcgcctggaggcccgtcgcgccgcgagtgtcctgaaaagcctgccgttcgaggttaccagcatgaaagacatccaaggtctgccgtgcattaccgacgacgtacgtcctgtgatcgaagagatcatcgaagtaggcgagagcagccgtgttaaagaaatcctcaatgacgagcgctacaaggcctttaagcagttcaccagcgtgttcggtgtgggcatgaagaccgcggaaaagtggtaccgtatgggcctccgtacgctggaagaagtaaaggccagtaagttcctgaagctgaacaagatgcagaaggcgggcttcctgtactacgaggatctggcgagcggtgttacgaaagaagaaaaagatgccgttctggatatcgtgaaggaaacggtgtggactgttgatccggatgcgctggtgaccatcgtgggcggtttccgccgtggcaaacctcagggccacgacgttgacctgctgatcacgattccgggccgtcctacggatccggagctgctccacaacgtggttgatctgctcaagaagcaaggtctgctgctgtacggggacatccgtgagcgtacgttcgtggaggggcaactgccaaatcctaaacctgaccagctggacaatcatcagaagtgcttcgccattctcaagctgtaccgcccgaaggtggataacagtgcggttgggacgtcgaagaaagtcgacatggctgaggttaaggattggaaagcggttcgtgtggatctggtggtcgctccagatgagcagttcgcctatgcgaaactcggttggacgggcagcggcatgtttcgtcgcgatactcgtcgctacgcggaggaagagcgcgacatgctgctcgacaaccatggtctctacgacctgaaaaagggcatttttctgagtgcggacagcgaagaagagattttcggtcatctggacctggattatctggagccgtgggaacgcaacgcg

SEQ ID NO: 6430 - protein, 394 aa, synthetic construct
  REGION 1..394: note = Variant of terminal deoxynucleotidyl transferase
MHHHHHHGGSGHPEGNTPEKEVPSVIARHVSPYACQRKTTLNNYNKKITDALEIMAENYKFKENLQARLEARRAASVLKSLPFEVTSMKDIQGLPCITDDVRPVIEEIIEVGESSRVKEILNDERYKAFKQFTSVFGVGMKTAEKWYRMGLRTLEEVKASKFLKLNKMQKAGFLYYEDLASGVTKEEKDAVLDIVKETVWTVDPDALVTIVGGFRRGKPQGHDVDLLITIPGRPTDPELLHNVVDLLKKQGLLLYGDIRERTFVEGQLPNPKPDQLDNHQKCFAILKLYRPKVDNSAVGTSKKVDMAEVKDWKAVRVDLVVAPDEQFAYAKLGWTGSGMFRRDTRRYAEEERDMLLDNHGLYDLKKGIFLSADSEEEIFGHLDLDYLEPWERNA

SEQ ID NO: 6431 - DNA, 1182 bp, synthetic construct
  misc_feature 1..1182: note = Variant of terminal deoxynucleotidyl transferase
  source 1..1182: mol_type = other DNA
atgcaccatcatcaccatcacgggggctccggccatccggaaggtaataccccggagaaggaggtgccgagcgttatcgcccgtcatgttagtccgtacgcgtgccagcgcaagaccacgctgaataactacaacaaaaagatcaccgacgcgctggagatcatggccgagaactacaagtttaaagagaacctgcaggcgcgcctggaggcccgtcgcgccgcgagtgtcctgaaaagcctgccgttcgaggttaccagcatgaaagacatccaaggtctgccgtgcattaccgacgacgtacgtcctgtgatcgaagagatcatcgaagtaggcgagagcagccgtgttaaagaaatcctcaatgacgagcgctacaaggcctttaagcagttcaccagcgtgttcggtgtgggctctaagaccgcggaaaagtggtaccgtatgggcctccgtacgctggaagaagtaaaggccagtaagttcctgaagctgaacaagatgcagaaggcgggcttcctgtactacgaggatctggcgagcggtgttacgaaagaagaaaaagatgccgttctggatatcgtgaaggaaacggtgtggactgttgatccggatgcgctggtgaccatcgtgggcggtttccgccgtggcaaacctcagggccacgacgttgacctgctgatcacgattccgggccgtcctacggatccggagctgctccacaacgtggttgatctgctcaagaagcaaggtctgctgctgtacggggacatccgtgagcgtacgttcgtggaggggcaactgccaaatcctaaacctgaccagctggacaatcatcagaagtgcttcgccattctcaagctgtaccgcccgaaggtggataacagtgcggttgggacgtcgaagaaagtcgacatggctgaggttaaggattggaaagcggttcgtgtggatctggtggtcgctccagatgagcagttcgcctatgcgaaactcggttggacgggcagcggcatgtttcgtcgcgatactcgtcgctacgcggaggaagagcgcgacatgctgctcgacaaccatggtctctacgacctgaaaaagggcatttttctgagtgcggacagcgaagaagagattttcggtcatctggacctggattatctggagccgtgggaacgcaacgcg

SEQ ID NO: 6432 - protein, 394 aa, synthetic construct
  REGION 1..394: note = Variant of terminal deoxynucleotidyl transferase
MHHHHHHGGSGHPEGNTPEKEVPSVIARHVSPYACQRKTTLNNYNKKITDALEIMAENYKFKENLQARLEARRAASVLKSLPFEVTSMKDIQGLPCITDDVRPVIEEIIEVGESSRVKEILNDERYKAFKQFTSVFGVGSKTAEKWYRMGLRTLEEVKASKFLKLNKMQKAGFLYYEDLASGVTKEEKDAVLDIVKETVWTVDPDALVTIVGGFRRGKPQGHDVDLLITIPGRPTDPELLHNVVDLLKKQGLLLYGDIRERTFVEGQLPNPKPDQLDNHQKCFAILKLYRPKVDNSAVGTSKKVDMAEVKDWKAVRVDLVVAPDEQFAYAKLGWTGSGMFRRDTRRYAEEERDMLLDNHGLYDLKKGIFLSADSEEEIFGHLDLDYLEPWERNA

SEQ ID NO: 6433 - DNA, 1182 bp, synthetic construct
  misc_feature 1..1182: note = Variant of terminal deoxynucleotidyl transferase
  source 1..1182: mol_type = other DNA
atgcaccatcatcaccatcacgggggctccggccatccggaaggtaataccccggagaaggaggtgccgagcgttatcgcccgtcatgttagtccgtacgcgtgccagcgcaagaccacgctgaataactacaacaaaaagatcaccgacgcgctggagatcatggccgagaactacaagtttaaagagaacctgcaggcgcgcctggaggcccgtcgcgccgcgagtgtcctgaaaagcctgccgttcgaggttaccagcatgaaagacatccaaggtctgccgtgcattaccgacgacgtacgtcctgtgatcgaagagatcatcgaagtaggcgagagcagccgtgttaaagaaatcctcaatgacgagcgctacaaggcctttaagcagttcaccagcgtgttcggtgtgggcgtcaagaccgcggaaaagtggtaccgtatgggcctccgtacgctggaagaagtaaaggccagtaagttcctgaagctgaacaagatgcagaaggcgggcttcctgtactacgaggatctggcgagcggtgttacgaaagaagaaaaagatgccgttctggatatcgtgaaggaaacggtgtggactgttgatccggatgcgctggtgaccatcgtgggcggtttccgccgtggcaaacctcagggccacgacgttgacctgctgatcacgagtccgggccgtcctacggatccggagctgctccacaacgtggttgatctgctcaagaagcaaggtctgctgctgtacggggacatccgtgagcgtacgttcgtggaggggcaactgccaaatcctaaacctgaccagctggacaatcatcagaagtgcttcgccattctcaagctgtaccgcccgaaggtggataacagtgcggttgggacgtcgaagaaagtcgacatggctgaggttaaggattggaaagcggttcgtgtggatctggtggtcgctccagatgagcagttcgcctatgcgaaactcggttggacgggcagcggcatgtttcgtcgcgatactcgtcgctacgcggaggaagagcgcgacatgctgctcgacaaccatggtctctacgacctgaaaaagggcatttttctgagtgcggacagcgaagaagagattttcggtcatctggacctggattatctggagccgtgggaacgcaacgcg

SEQ ID NO: 6434 - protein, 394 aa, synthetic construct
  REGION 1..394: note = Variant of terminal deoxynucleotidyl transferase
MHHHHHHGGSGHPEGNTPEKEVPSVIARHVSPYACQRKTTLNNYNKKITDALEIMAENYKFKENLQARLEARRAASVLKSLPFEVTSMKDIQGLPCITDDVRPVIEEIIEVGESSRVKEILNDERYKAFKQFTSVFGVGVKTAEKWYRMGLRTLEEVKASKFLKLNKMQKAGFLYYEDLASGVTKEEKDAVLDIVKETVWTVDPDALVTIVGGFRRGKPQGHDVDLLITSPGRPTDPELLHNVVDLLKKQGLLLYGDIRERTFVEGQLPNPKPDQLDNHQKCFAILKLYRPKVDNSAVGTSKKVDMAEVKDWKAVRVDLVVAPDEQFAYAKLGWTGSGMFRRDTRRYAEEERDMLLDNHGLYDLKKGIFLSADSEEEIFGHLDLDYLEPWERNA

SEQ ID NO: 6435 - DNA, 1182 bp, synthetic construct
  misc_feature 1..1182: note = Variant of terminal deoxynucleotidyl transferase
  source 1..1182: mol_type = other DNA
atgcaccatcatcaccatcacgggggctccggccatccggaaggtaataccccggagaaggaggtgccgagcgttatcgcccgtcatgttagtccgtacgcgtgccagcgcaagaccacgctgaataactacaacaaaaagatcaccgacgcgctggagatcatggccgagaactacaagtttaaagagaacctgcaggcgcgcctggaggcccgtcgcgccgcgagtgtcctgaaaagcctgccgttcgaggttaccagcatgaaagacatccaaggtctgccgtgcattaccgacgacgtacgtcctgtgatcgaagagatcatcgaagtaggcgagagcagccgtgttaaagaaatcctcaatgacgagcgctacaaggcctttaagcagttcaccagcgtgttcggtgtgggcgtcaagaccgcggaaaagtggtaccgtatgggcctccgtacgctggaagaagtaaaggccagtaagttcctgaagctgaacaagatgcagaaggcgggcttcctgtactacgaggatctggcgagcggtgttacgaaagaagaaaaagatgccgttctggatatcgtgaaggaaacggtgtggactgttgatccggatgcgctggtgaccatcgtgggcggtttccgccgtggcaaacctcagggccacgacgttgacctgctgatcacgattccgggccgtcctacggatccggagctgctccacaacgtggttgatctgctcaagaagcaaggtctgctgctgtacggggacatccgtgagcgtacgttcgtggaggggcaactgccaaatcctaaacctgaccagctggacaatcatcagaagtgcttcgccattctcaagctgtaccgcccgaaggtggataacagtgcggttgggacgtcgaagaaagtcgacatggctgaggttaaggattggaaagcggttcgtgtggatctggtggtcgctccaagggagcagttcgcctatgcgaaactcggttggacgggcagcggcatgtttcgtcgcgatactcgtcgctacgcggaggaagagcgcgacatgctgctcgacaaccatggtctctacgacctgaaaaagggcatttttctgagtgcggacagcgaagaagagattttcggtcatctggacctggattatctggagccgtgggaacgcaacgcg

SEQ ID NO: 6436 - protein, 394 aa, synthetic construct
  REGION 1..394: note = Variant of terminal deoxynucleotidyl transferase
MHHHHHHGGSGHPEGNTPEKEVPSVIARHVSPYACQRKTTLNNYNKKITDALEIMAENYKFKENLQARLEARRAASVLKSLPFEVTSMKDIQGLPCITDDVRPVIEEIIEVGESSRVKEILNDERYKAFKQFTSVFGVGVKTAEKWYRMGLRTLEEVKASKFLKLNKMQKAGFLYYEDLASGVTKEEKDAVLDIVKETVWTVDPDALVTIVGGFRRGKPQGHDVDLLITIPGRPTDPELLHNVVDLLKKQGLLLYGDIRERTFVEGQLPNPKPDQLDNHQKCFAILKLYRPKVDNSAVGTSKKVDMAEVKDWKAVRVDLVVAPREQFAYAKLGWTGSGMFRRDTRRYAEEERDMLLDNHGLYDLKKGIFLSADSEEEIFGHLDLDYLEPWERNA

SEQ ID NO: 6437 - DNA, 1182 bp, synthetic construct
  misc_feature 1..1182: note = Variant of terminal deoxynucleotidyl transferase
  source 1..1182: mol_type = other DNA
atgcaccatcatcaccatcacgggggctccggccatccggaaggtaataccccggagaaggaggtgccgagcgttatcgcccgtcatgttagtccgtacgcgtgccagcgcaagaccacgctgaataactacaacaaaaagatcaccgacgcgctggagatcatggccgagaactacaagtttaaagagaacctgcaggcgcgcctggaggcccgtcgcgccgcgagtgtcctgaaaagcctgccgttcgaggttaccagcatgaaagacatccaaggtctgccgtgcattaccgacgacgtacgtcctgtgatcgaagagatcatcgaagtaggcgagagcagccgtgttaaagaaatcctcaatgacgagcgctacaaggcctttaagcagttcaccagcgtgttcggtgtgggcgtcaagaccgcggaaaagtggtaccgtatgggcctccgtacgctggaagaagtaaaggccagtaagttcctgaagctgaacaagatgcagaaggcgggcttcctgtactacgaggatctggcgagcggtgttacgaaagaagaaaaagatgccgttctggatatcgtgaaggaaacggtgtggactgttgatccggatgcgctggtgaccatcgtgggcggtttccgccgtggcaaacctcagggccacgacgttgacctgctgatcacgatgccgggccgtcctacggatccggagctgctccacaacgtggttgatctgctcaagaagcaaggtctgctgctgtacggggacatccgtgagcgtacgttcgtggaggggcaactgccaaatcctaaacctgaccagctggacaatcatcagaagtgcttcgccattctcaagctgtaccgcccgaaggtggataacagtgcggttgggacgtcgaagaaagtcgacatggctgaggttaaggattggaaagcggttcgtgtggatctggtggtcgctccagatgagcagttcgcctatgcgaaactcggttggacgggcagcggcatgtttcgtcgcgatactcgtcgctacgcggaggaagagcgcgacatgctgctcgacaaccatggtctctacgacctgaaaaagggcatttttctgagtgcggacagcgaagaagagattttcggtcatctggacctggattatctggagccgtgggaacgcaacgcg

SEQ ID NO: 6438 - protein, 394 aa, synthetic construct
  REGION 1..394: note = Variant of terminal deoxynucleotidyl transferase
MHHHHHHGGSGHPEGNTPEKEVPSVIARHVSPYACQRKTTLNNYNKKITDALEIMAENYKFKENLQARLEARRAASVLKSLPFEVTSMKDIQGLPCITDDVRPVIEEIIEVGESSRVKEILNDERYKAFKQFTSVFGVGVKTAEKWYRMGLRTLEEVKASKFLKLNKMQKAGFLYYEDLASGVTKEEKDAVLDIVKETVWTVDPDALVTIVGGFRRGKPQGHDVDLLITMPGRPTDPELLHNVVDLLKKQGLLLYGDIRERTFVEGQLPNPKPDQLDNHQKCFAILKLYRPKVDNSAVGTSKKVDMAEVKDWKAVRVDLVVAPDEQFAYAKLGWTGSGMFRRDTRRYAEEERDMLLDNHGLYDLKKGIFLSADSEEEIFGHLDLDYLEPWERNA

SEQ ID NO: 6439 - DNA, 1182 bp, synthetic construct
  misc_feature 1..1182: note = Variant of terminal deoxynucleotidyl transferase
  source 1..1182: mol_type = other DNA
atgcaccatcatcaccatcacgggggctccggccatccggaaggtaataccccggagaaggaggtgccgagcgttatcgcccgtcatgttagtccgtacgcgtgccagcgcaagaccacgctgaataactacaacaaaaagatcaccgacgcgctggagatcatggccgagaactacaagtttaaagagaacctgcaggcgcgcctggaggcccgtcgcgccgcgagtgtcctgaaaagcctgccgttcgaggttaccagcatgaaagacatccaaggtctgccgtgcattaccgacgacgtacgtcctgtgatcgaagagatcatcgaagtaggcgagagcagccgtgttaaagaaatcctcaatgacgagcgctacaaggcctttaagcagttcaccagcgtgttcggtgtgggcgtcaagaccgcggaaaagtggtaccgtatgggcctccgtacgctggaagaagtaaaggccagtaagttcctgaagctgaacaagatgcagaaggcgggcttcctgtactacgaggatctggcgagcggtgttacgaaagaagaaaaagatgccgttctggatatcgtgaaggaaacggtgtggactgttgatccggatgcgctggtgaccatcgctggcggtttccgccgtggcaaacctcagggccacgacgttgacctgctgatcacgattccgggccgtcctacggatccggagctgctccacaacgtggttgatctgctcaagaagcaaggtctgctgctgtacggggacatccgtgagcgtacgttcgtggaggggcaactgccaaatcctaaacctgaccagctggacaatcatcagaagtgcttcgccattctcaagctgtaccgcccgaaggtggataacagtgcggttgggacgtcgaagaaagtcgacatggctgaggttaaggattggaaagcggttcgtgtggatctggtggtcgctccagatgagcagttcgcctatgcgaaactcggttggacgggcagcggcatgtttcgtcgcgatactcgtcgctacgcggaggaagagcgcgacatgctgctcgacaaccatggtctctacgacctgaaaaagggcatttttctgagtgcggacagcgaagaagagattttcggtcatctggacctggattatctggagccgtgggaacgcaacgcg

SEQ ID NO: 6440 - protein, 394 aa, synthetic construct
  REGION 1..394: note = Variant of terminal deoxynucleotidyl transferase
MHHHHHHGGSGHPEGNTPEKEVPSVIARHVSPYACQRKTTLNNYNKKITDALEIMAENYKFKENLQARLEARRAASVLKSLPFEVTSMKDIQGLPCITDDVRPVIEEIIEVGESSRVKEILNDERYKAFKQFTSVFGVGVKTAEKWYRMGLRTLEEVKASKFLKLNKMQKAGFLYYEDLASGVTKEEKDAVLDIVKETVWTVDPDALVTIAGGFRRGKPQGHDVDLLITIPGRPTDPELLHNVVDLLKKQGLLLYGDIRERTFVEGQLPNPKPDQLDNHQKCFAILKLYRPKVDNSAVGTSKKVDMAEVKDWKAVRVDLVVAPDEQFAYAKLGWTGSGMFRRDTRRYAEEERDMLLDNHGLYDLKKGIFLSADSEEEIFGHLDLDYLEPWERNA

SEQ ID NO: 6441 - DNA, 1182 bp, synthetic construct
  misc_feature 1..1182: note = Variant of terminal deoxynucleotidyl transferase
  source 1..1182: mol_type = other DNA
atgcaccatcatcaccatcacgggggctccggccatccggaaggtaataccccggagaaggaggtgccgagcgttatcgcccgtcatgttagtccgtacgcgtgccagcgcaagaccacgctgaataactacaacaaaaagatcaccgacgcgctggagatcatggccgagaactacaagtttaaagagaacctgcaggcgcgcctggaggcccgtcgcgccgcgagtgtcctgaaaagcctgccgttcgaggttaccagcatgaaagacatccaaggtctgccgtgcattaccgacgacgtacgtcctgtgatcgaagagatcatcgaagtaggcgagagcagccgtgttaaagaaatcctcaatgacgagcgctacaaggcctttaagcagttcaccagcgtgttcggtgtgggcgggaagaccgcggaaaagtggtaccgtatgggcctccgtacgctggaagaagtaaaggccagtaagttcctgaagctgaacaagatgcagaaggcgggcttcctgtactacgaggatctggcgagcggtgttacgaaagaagaaaaagatgccgttctggatatcgtgaaggaaacggtgtggactgttgatccggatgcgctggtgaccatcgtgggcggtttccgccgtggcaaacctcagggccacgacgttgacctgctgatcacgattccgggccgtcctacggatccggagctgctccacaacgtggttgatctgctcaagaagcaaggtctgctgctgtacggggacatccgtgagcgtacgttcgtggaggggcaactgccaaatcctaaacctgaccagctggacaatcatcagaagtgcttcgccattctcaagctgtaccgcccgaaggtggataacagtgcggttgggacgtcgaagaaagtcgacatggctgaggttaaggattggaaagcggttcgtgtggatctggtggtcgctccagatgagcagttcgcctatgcgaaactcggttggacgggcagcggcatgtttcgtcgcgatactcgtcgctacgcggaggaagagcgcgacatgctgctcgacaaccatggtctctacgacctgaaaaagggcatttttctgagtgcggacagcgaagaagagattttcggtcatctggacctggattatctggagccgtgggaacgcaacgcg

SEQ ID NO: 6442 - protein, 394 aa, synthetic construct
  REGION 1..394: note = Variant of terminal deoxynucleotidyl transferase
MHHHHHHGGSGHPEGNTPEKEVPSVIARHVSPYACQRKTTLNNYNKKITDALEIMAENYKFKENLQARLEARRAASVLKSLPFEVTSMKDIQGLPCITDDVRPVIEEIIEVGESSRVKEILNDERYKAFKQFTSVFGVGGKTAEKWYRMGLRTLEEVKASKFLKLNKMQKAGFLYYEDLASGVTKEEKDAVLDIVKETVWTVDPDALVTIVGGFRRGKPQGHDVDLLITIPGRPTDPELLHNVVDLLKKQGLLLYGDIRERTFVEGQLPNPKPDQLDNHQKCFAILKLYRPKVDNSAVGTSKKVDMAEVKDWKAVRVDLVVAPDEQFAYAKLGWTGSGMFRRDTRRYAEEERDMLLDNHGLYDLKKGIFLSADSEEEIFGHLDLDYLEPWERNA

SEQ ID NO: 6443 - DNA, 1182 bp, synthetic construct
  misc_feature 1..1182: note = Variant of terminal deoxynucleotidyl transferase
  source 1..1182: mol_type = other DNA
atgcaccatcatcaccatcacgggggctccggccatccggaaggtaataccccggagaaggaggtgccgagcgttatcgcccgtcatgttagtccgtacgcgtgccagcgcaagaccacgctgaataactacaacaaaaagatcaccgacgcgctggagatcatggccgagaactacaagtttaaagagaacctgcaggcgcgcctggaggcccgtcgcgccgcgagtgtcctgaaaagcctgccgttcgaggttaccagcatgaaagacatccaaggtctgccgtgcattaccgacgacgtacgtcctgtgatcgaagagatcatcgaagtaggcgagagcagccgtgttaaagaaatcctcaatgacgagcgctacaaggcctttaagcagttcaccagcgtgttcggtgtgggcgtcaagaccgcggaaaagtggtaccgtatgggcctccgtacgctggaagaagtaaaggccagtaagttcctgaagctgaacaagatgcagaaggcgggcttcctgtactacgaggatctggcgagcggtgttacgaaagaagaaaaagatgccgttctggatatcgtgaaggaaacggtgcgcactacgagtccggatgcgctggtgaccatcgtgggcggtttccgccgtggcaaacctcagggccacgacgttgacctgctgatcacgattccgggccgtcctacggatccggagctgctccacaacgtggttgatctgctcaagaagcaaggtctgctgctgtacggggacatccgtgagcgtacgttcgtggaggggcaactgccaaatcctaaacctgaccagctggacaatcatcagaagtgcttcgccattctcaagctgtaccgcccgaaggtggataacagtgcggttgggacgtcgaagaaagtcgacatggctgaggttaaggattggaaagcggttcgtgtggatctggtggtcgctccagatgagcagttcgcctatgcgaaactcggttggacgggcagcggcatgtttcgtcgcgatactcgtcgctacgcggaggaagagcgcgacatgctgctcgacaaccatggtctctacgacctgaaaaagggcatttttctgagtgcggacagcgaagaagagattttcggtcatctggacctggattatctggagccgtgggaacgcaacgcg

SEQ ID NO: 6444 - protein, 394 aa, synthetic construct
  REGION 1..394: note = Variant of terminal deoxynucleotidyl transferase
MHHHHHHGGSGHPEGNTPEKEVPSVIARHVSPYACQRKTTLNNYNKKITDALEIMAENYKFKENLQARLEARRAASVLKSLPFEVTSMKDIQGLPCITDDVRPVIEEIIEVGESSRVKEILNDERYKAFKQFTSVFGVGVKTAEKWYRMGLRTLEEVKASKFLKLNKMQKAGFLYYEDLASGVTKEEKDAVLDIVKETVRTTSPDALVTIVGGFRRGKPQGHDVDLLITIPGRPTDPELLHNVVDLLKKQGLLLYGDIRERTFVEGQLPNPKPDQLDNHQKCFAILKLYRPKVDNSAVGTSKKVDMAEVKDWKAVRVDLVVAPDEQFAYAKLGWTGSGMFRRDTRRYAEEERDMLLDNHGLYDLKKGIFLSADSEEEIFGHLDLDYLEPWERNA

SEQ ID NO: 6445 - DNA, 1182 bp, synthetic construct
  misc_feature 1..1182: note = Variant of terminal deoxynucleotidyl transferase
  source 1..1182: mol_type = other DNA
atgcaccatcatcaccatcacgggggctccggccatccggaaggtaataccccggagaaggaggtgccgagcgttatcgcccgtcatgttagtccgtacgcgtgccagcgcaagaccacgctgaataactacaacaaaaagatcaccgacgcgctggaaatcatggcctgtaactacaagtttaaagagaacctgcaggcgcgcctggaggcccgtcgcgccgcgagtgtcctgaaaagcctgccgttcgaggttaccagcatgaaagacatccaaggtctgccgtgcattaccgacgacgtacgtcctgtgatcgaagagatcatcgaagtaggcgagagcagccgtgttaaagaaatcctcaatgacgagcgctacaaggcctttaagcagttcaccagcgtgttcggtgtgggcgtcaagaccgcggaaaagtggtaccgtatgggcctccgtacgctggaagaagtaaaggccagtaagttcctgaagctgaacaagatgcagaaggcgggcttcctgtactacgaggatctggcgagcggtgttacgaaagaagaaaaagatgccgttctggatatcgtgaaggaaacggtgtggactgttgatccggatgcgctggtgaccatcgtgggcggtttccgccgtggcaaacctcagggccacgacgttgacctgctgatcacgattccgggccgtcctacggatccggagctgctccacaacgtggttgatctgctcaagaagcaaggtctgctgctgtacggggacatccgtgagcgtacgttcgtggaggggcaactgccaaatcctaaacctgaccagctggacaatcatcagaagtgcttcgccattctcaagctgtaccgcccgaaggtggataacagtgcggttgggacgtcgaagaaagtcgacatggctgaggttaaggattggaaagcggttcgtgtggatctggtggtcgctccagatgagcagttcgcctatgcgaaactcggttggacgggcagcggcatgtttcgtcgcgatactcgtcgctacgcggaggaagagcgcgacatgctgctcgacaaccatggtctctacgacctgaaaaagggcatttttctgagtgcggacagcgaagaagagattttcggtcatctggacctggattatctggagccgtgggaacgcaacgcg

SEQ ID NO: 6446 - protein, 394 aa, synthetic construct
  REGION 1..394: note = Variant of terminal deoxynucleotidyl transferase
MHHHHHHGGSGHPEGNTPEKEVPSVIARHVSPYACQRKTTLNNYNKKITDALEIMACNYKFKENLQARLEARRAASVLKSLPFEVTSMKDIQGLPCITDDVRPVIEEIIEVGESSRVKEILNDERYKAFKQFTSVFGVGVKTAEKWYRMGLRTLEEVKASKFLKLNKMQKAGFLYYEDLASGVTKEEKDAVLDIVKETVWTVDPDALVTIVGGFRRGKPQGHDVDLLITIPGRPTDPELLHNVVDLLKKQGLLLYGDIRERTFVEGQLPNPKPDQLDNHQKCFAILKLYRPKVDNSAVGTSKKVDMAEVKDWKAVRVDLVVAPDEQFAYAKLGWTGSGMFRRDTRRYAEEERDMLLDNHGLYDLKKGIFLSADSEEEIFGHLDLDYLEPWERNA

SEQ ID NO: 6447 - DNA, 1182 bp, synthetic construct
  misc_feature 1..1182: note = Variant of terminal deoxynucleotidyl transferase
  source 1..1182: mol_type = other DNA
atgcaccatcatcaccatcacgggggctccggccatccggaaggtaataccccggagaaggaggtgccgagcgttatcgcccgtcatgttagtccgtacgcgtgccagcgcaagaccacgctgaataactacaacaaaaagatcaccgacgcgctggagatcatggccgagaactacaagtttaaagagaacctgcaggcgcgcctggaggcccgtcgcgccgcgagtgtcctgaaaagcctgccgttcgaggttaccagcatgaaagacatccaaggtctgccgtgcattaccgacgacgtacgtcctgtgatcgaagagatcatcgaagtaggcgagagcagccgtgttaaagaaatcctcaatgacgagcgctacaagggttttaagcagttcaccagcgtgttcggtgtgggcgtcaagaccgcggaaaagtggtaccgtatgggcctccgtacgctggaagaagtaaaggccagtaagttcctgaagctgaacaagatgcagaaggcgggcttcctgtactacgaggatctggcgagcggtgttacgaaagaagaaaaagatgccgttctggatatcgtgaaggaaacggtgtggactgttgatccggatgcgctggtgaccatcgtgggcggtttccgccgtggcaaacctcagggccacgacgttgacctgctgatcacgattccgggccgtcctacggatccggagctgctccacaacgtggttgatctgctcaagaagcaaggtctgctgctgtacggggacatccgtgagcgtacgttcgtggaggggcaactgccaaatcctaaacctgaccagctggacaatcatcagaagtgcttcgccattctcaagctgtaccgcccgaaggtggataacagtgcggttgggacgtcgaagaaagtcgacatggctgaggttaaggattggaaagcggttcgtgtggatctggtggtcgctccagatgagcagttcgcctatgcgaaactcggttggacgggcagcggcatgtttcgtcgcgatactcgtcgctacgcggaggaagagcgcgacatgctgctcgacaaccatggtctctacgacctgaaaaagggcatttttctgagtgcggacagcgaagaagagattttcggtcatctggacctggattatctggagccgtgggaacgcaacgcg

SEQ ID NO: 6448 - protein, 394 aa, synthetic construct
  REGION 1..394: note = Variant of terminal deoxynucleotidyl transferase
MHHHHHHGGSGHPEGNTPEKEVPSVIARHVSPYACQRKTTLNNYNKKITDALEIMAENYKFKENLQARLEARRAASVLKSLPFEVTSMKDIQGLPCITDDVRPVIEEIIEVGESSRVKEILNDERYKGFKQFTSVFGVGVKTAEKWYRMGLRTLEEVKASKFLKLNKMQKAGFLYYEDLASGVTKEEKDAVLDIVKETVWTVDPDALVTIVGGFRRGKPQGHDVDLLITIPGRPTDPELLHNVVDLLKKQGLLLYGDIRERTFVEGQLPNPKPDQLDNHQKCFAILKLYRPKVDNSAVGTSKKVDMAEVKDWKAVRVDLVVAPDEQFAYAKLGWTGSGMFRRDTRRYAEEERDMLLDNHGLYDLKKGIFLSADSEEEIFGHLDLDYLEPWERNA

SEQ ID NO: 6449 - DNA, 1182 bp, synthetic construct
  misc_feature 1..1182: note = Variant of terminal deoxynucleotidyl transferase
  source 1..1182: mol_type = other DNA
atgcaccatcatcaccatcacgggggctccggccatccggaaggtaataccccggagaaggaggtgccgagcgttatcgcccgtcatgttagtccgtacgcgtgccagcgcaagaccacgctgaataactacaacaaaaagatcaccgacgcgctggagatcatggccgagaactacaagtttaaagagaacctgcaggcgcgcctggaggcccgtcgcgccgcgagtgtcctgaaaagcctgccgttcgaggttaccagcatgaaagacatccaaggtctgccgtgcattaccgacgacgtacgtcctgtgatcgaagagatcatcgaagtaggcgagagcagccgtgttaaagaaatcctcaatgacgagcgctacaaggcctttaagcagttcaccagcgtgttcggtgtgggcgtcaagaccgcggaaaagtggtaccgtatgggcctccgtacgctggaagaagtaaaggccagtaagttcctgaagctgaacaagatgcagaaggcgggcttcctgtactacgaggatctggcgagcggtgttacgaaagaagaaaaagatgccgttctggatatcgtgaaggaaacggtgtggactgttgatccggatgcgctggtgaccatcgtgggcggtttccgccgtggcaaacatcagggccacgacgttgacctgctgatcacgattccgggccgtcctacggatccggagctgctccacaacgtggttgatctgctcaagaagcaaggtctgctgctgtacggggacatccgtgagcgtacgttcgtggaggggcaactgccaaatcctaaacctgaccagctggacaatcatcagaagtgcttcgccattctcaagctgtaccgcccgaaggtggataacagtgcggttgggacgtcgaagaaagtcgacatggctgaggttaaggattggaaagcggttcgtgtggatctggtggtcgctccagatgagcagttcgcctatgcgaaactcggttggacgggcagcggcatgtttcgtcgcgatactcgtcgctacgcggaggaagagcgcgacatgctgctcgacaaccatggtctctacgacctgaaaaagggcatttttctgagtgcggacagcgaagaagagattttcggtcatctggacctggattatctggagccgtgggaacgcaacgcg

SEQ ID NO: 6450 - protein, 394 aa, synthetic construct
  REGION 1..394: note = Variant of terminal deoxynucleotidyl transferase
MHHHHHHGGSGHPEGNTPEKEVPSVIARHVSPYACQRKTTLNNYNKKITDALEIMAENYKFKENLQARLEARRAASVLKSLPFEVTSMKDIQGLPCITDDVRPVIEEIIEVGESSRVKEILNDERYKAFKQFTSVFGVGVKTAEKWYRMGLRTLEEVKASKFLKLNKMQKAGFLYYEDLASGVTKEEKDAVLDIVKETVWTVDPDALVTIVGGFRRGKHQGHDVDLLITIPGRPTDPELLHNVVDLLKKQGLLLYGDIRERTFVEGQLPNPKPDQLDNHQKCFAILKLYRPKVDNSAVGTSKKVDMAEVKDWKAVRVDLVVAPDEQFAYAKLGWTGSGMFRRDTRRYAEEERDMLLDNHGLYDLKKGIFLSADSEEEIFGHLDLDYLEPWERNA

SEQ ID NO: 6451 - DNA, 1182 bp, synthetic construct
  misc_feature 1..1182: note = Variant of terminal deoxynucleotidyl transferase
  source 1..1182: mol_type = other DNA
atgcaccatcatcaccatcacgggggctccggccatccggaaggtaataccccggagaaggaggtgccgagcgttatcgcccgtcatgttagtccgtacgcgtgccagcgcaagaccacgctgaataactacaacaaaaagatcaccgacgcgctggagatcatggccgagaactacaagtttaaagagaacctgcaggcgcgcctggaggcccgtcgcgccgcgagtgtcctgaaaagcctgccgttcgaggttaccagcatgaaagacatccaaggtctgccgtgcattaccgacgacgtacgtcctgtgatcgaagagatcatcgaagtaggcgagagcagccgtgttaaagaaatcctcaatgacgagcgctacaaggcctttaagcagttcaccagcgtgttcggtgtgggcgtcaagaccgcggaaaagtggtaccgtatgggcgttcgtacgctggaagaagtaaaggccagtaagttcctgaagctgaacaagatgcagaaggcgggcttcctgtactacgaggatctggcgagcggtgttacgaaagaagaaaaagatgccgttctggatatcgtgaaggaaacggtgtggactgttgatccggatgcgctggtgaccatcgtgggcggtttccgccgtggcaaacctcagggccacgacgttgacctgctgatcacgattccgggccgtcctacggatccggagctgctccacaacgtggttgatctgctcaagaagcaaggtctgctgctgtacggggacatccgtgagcgtacgttcgtggaggggcaactgccaaatcctaaacctgaccagctggacaatcatcagaagtgcttcgccattctcaagctgtaccgcccgaaggtggataacagtgcggttgggacgtcgaagaaagtcgacatggctgaggttaaggattggaaagcggttcgtgtggatctggtggtcgctccagatgagcagttcgcctatgcgaaactcggttggacgggcagcggcatgtttcgtcgcgatactcgtcgctacgcggaggaagagcgcgacatgctgctcgacaaccatggtctctacgacctgaaaaagggcatttttctgagtgcggacagcgaagaagagattttcggtcatctggacctggattatctggagccgtgggaacgcaacgcg

SEQ ID NO: 6452 - protein, 394 aa, synthetic construct
  REGION 1..394: note = Variant of terminal deoxynucleotidyl transferase
MHHHHHHGGSGHPEGNTPEKEVPSVIARHVSPYACQRKTTLNNYNKKITDALEIMAENYKFKENLQARLEARRAASVLKSLPFEVTSMKDIQGLPCITDDVRPVIEEIIEVGESSRVKEILNDERYKAFKQFTSVFGVGVKTAEKWYRMGVRTLEEVKASKFLKLNKMQKAGFLYYEDLASGVTKEEKDAVLDIVKETVWTVDPDALVTIVGGFRRGKPQGHDVDLLITIPGRPTDPELLHNVVDLLKKQGLLLYGDIRERTFVEGQLPNPKPDQLDNHQKCFAILKLYRPKVDNSAVGTSKKVDMAEVKDWKAVRVDLVVAPDEQFAYAKLGWTGSGMFRRDTRRYAEEERDMLLDNHGLYDLKKGIFLSADSEEEIFGHLDLDYLEPWERNA

SEQ ID NO: 6453 - DNA, 1182 bp, synthetic construct
  misc_feature 1..1182: note = Variant of terminal deoxynucleotidyl transferase
  source 1..1182: mol_type = other DNA
atgcaccatcatcaccatcacgggggctccggccatccggaaggtaataccccggagaaggaggtgccgagcgttatcgcccgtcatgttagtccgtacgcgtgccagcgcaagaccacgctgaataactacaacaaaaagatcaccgacgcgctggagatcatggccgagaactacaagtttaaagagaacctgcaggcgcgcctggaggcccgtcgcgccgcgagtgtcctgaaaagcctgccgttcgaggttaccagcatgaaagacatccaaggtctgccgtgcattaccgacgacgtacgtcctgtgatcgaagagatcatcgaagtaggcgagagcagccgtgttaaagaaatcctcaatgacgagcgctacaaggcctttaagcagttcacctgtgtgttcggtgtgggcgtcaagaccgcggaaaagtggtaccgtatgggcctccgtacgctggaagaagtaaaggccagtaagttcctgaagctgaacaagatgcagaaggcgggcttcctgtactacgaggatctggcgagcggtgttacgaaagaagaaaaagatgccgttctggatatcgtgaaggaaacggtgtggactgttgatccggatgcgctggtgaccatcgtgggcggtttccgccgtggcaaacctcagggccacgacgttgacctgctgatcacgattccgggccgtcctacggatccggagctgctccacaacgtggttgatctgctcaagaagcaaggtctgctgctgtacggggacatccgtgagcgtacgttcgtggaggggcaactgccaaatcctaaacctgaccagctggacaatcatcagaagtgcttcgccattctcaagctgtaccgcccgaaggtggataacagtgcggttgggacgtcgaagaaagtcgacatggctgaggttaaggattggaaagcggttcgtgtggatctggtggtcgctccagatgagcagttcgcctatgcgaaactcggttggacgggcagcggcatgtttcgtcgcgatactcgtcgctacgcggaggaagagcgcgacatgctgctcgacaaccatggtctctacgacctgaaaaagggcatttttctgagtgcggacagcgaagaagagattttcggtcatctggacctggattatctggagccgtgggaacgcaacgcg

SEQ ID NO: 6454 - protein, 394 aa, synthetic construct
  REGION 1..394: note = Variant of terminal deoxynucleotidyl transferase
MHHHHHHGGSGHPEGNTPEKEVPSVIARHVSPYACQRKTTLNNYNKKITDALEIMAENYKFKENLQARLEARRAASVLKSLPFEVTSMKDIQGLPCITDDVRPVIEEIIEVGESSRVKEILNDERYKAFKQFTCVFGVGVKTAEKWYRMGLRTLEEVKASKFLKLNKMQKAGFLYYEDLASGVTKEEKDAVLDIVKETVWTVDPDALVTIVGGFRRGKPQGHDVDLLITIPGRPTDPELLHNVVDLLKKQGLLLYGDIRERTFVEGQLPNPKPDQLDNHQKCFAILKLYRPKVDNSAVGTSKKVDMAEVKDWKAVRVDLVVAPDEQFAYAKLGWTGSGMFRRDTRRYAEEERDMLLDNHGLYDLKKGIFLSADSEEEIFGHLDLDYLEPWERNA

SEQ ID NO: 6455 - DNA, 1182 bp, synthetic construct
  misc_feature 1..1182: note = Variant of terminal deoxynucleotidyl transferase
  source 1..1182: mol_type = other DNA
atgcaccatcatcaccatcacgggggctccggccatccggaaggtaataccccggagaaggaggtgccgagcgttatcgcccgtcatgttagtccgtacgcgtgccagcgcaagaccacgctgaataactacaacaaaaagatcaccgacgcgctggagatcatggccgagaactacaagtttaaagagaacctgcaggcgcgcctggaggcccgtcgcgccgcgagtgtcctgaaaagcctgccgttcgaggttaccagcatgaaagacatccaaggtctgccgtgcattaccgacgacgtacgtcctgtgatcgaagagatcatcgaagtaggcgagagcagccgtgttaaagaaatcctcaatgacgagcgctacaaggcctttaagcagttcaccagcgtgttcggtgtgggcgtcaagaccgcggaaaagtggtaccgtatgggcctccgtacgctggaagaagtaaaggccagtaagttcctgaagctgaacaagatgcagaaggcgggcttcctgtactacgaggatctggcgagcggtgttacgaaagaagaaaaagatgccgttctggatatcgtgaaggaaacggtgtggactgttgatccggatgcgctggtgaccatcgtgggcggtttccgccgtggcaaacctcagggccacgacgttgacctgctgatcacgattccgggccgtcctacggatccggagctgctccacaacgtggttgatctgctcaagaagcaaggtctgctgctgtacggggacatccgtgagcgtacgttcgtggaggggcaactgccaaatcctaaacctgaccagctggacaatcatcagaagtgcttcgccattctcaagctgtaccgcccgaaggtggataacagtgcggttgggacgtcgaagaaagtcgacatggctgaggttaaggattggaaagcggttcgtgtggatctggtggtcgctccagatgagcagttcgcctatgcgaaactcggttggacgggcagcggcatgtttcgtcgcgatactaagcgctacgcggaggaagagcgcgacatgctgctcgacaaccatggtctctacgacctgaaaaagggcatttttctgagtgcggacagcgaagaagagattttcggtcatctggacctggattatctggagccgtgggaacgcaacgcg

SEQ ID NO: 6456 - protein, 394 aa, synthetic construct
  REGION 1..394: note = Variant of terminal deoxynucleotidyl transferase
MHHHHHHGGSGHPEGNTPEKEVPSVIARHVSPYACQRKTTLNNYNKKITDALEIMAENYKFKENLQARLEARRAASVLKSLPFEVTSMKDIQGLPCITDDVRPVIEEIIEVGESSRVKEILNDERYKAFKQFTSVFGVGVKTAEKWYRMGLRTLEEVKASKFLKLNKMQKAGFLYYEDLASGVTKEEKDAVLDIVKETVWTVDPDALVTIVGGFRRGKPQGHDVDLLITIPGRPTDPELLHNVVDLLKKQGLLLYGDIRERTFVEGQLPNPKPDQLDNHQKCFAILKLYRPKVDNSAVGTSKKVDMAEVKDWKAVRVDLVVAPDEQFAYAKLGWTGSGMFRRDTKRYAEEERDMLLDNHGLYDLKKGIFLSADSEEEIFGHLDLDYLEPWERNA

SEQ ID NO: 6457 - DNA, 1182 bp, synthetic construct
  misc_feature 1..1182: note = Variant of terminal deoxynucleotidyl transferase
  source 1..1182: mol_type = other DNA
atgcaccatcatcaccatcacgggggctccggccatccggaaggtaataccccggagaaggaggtgccgagcgttatcgcccgtcatgttagtccgtacgcgtgccagcgcaagaccacgctgaataactacaacaaaaagatcaccgacgcgctggagatcatggccgagaactacaagtttaaagagaacctgcaggcgcgcctggaggcccgtcgcgccgcgagtgtcctgaaaagcctgccgttcgaggttaccagcatgaaagacatccaaggtctgccgtgcattaccgacgacgtacgtcctgtgatcgaagagatcatcgaagtaggcgagagcagccgtgttaaagaaatcctcaatgacgagcgctacaaggcctttaagcagttcaccagcgtgttcggtgtgggcgtcaagaccgcggaaaagtggtaccgtatgggcctccgtacgctggaagaaacgaaggccagtaagttcctgaagctgaacaagatgcagaaggcgggcttcctgtactacgaggatctggcgagcggtgttacgaaagaagaaaaagatgccgttctggatatcgtgaaggaaacggtgtggactgttgatccggatgcgctggtgaccatcgtgggcggtttccgccgtggcaaacctcagggccacgacgttgacctgctgatcacgattccgggccgtcctacggatccggagctgctccacaacgtggttgatctgctcaagaagcaaggtctgctgctgtacggggacatccgtgagcgtacgttcgtggaggggcaactgccaaatcctaaacctgaccagctggacaatcatcagaagtgcttcgccattctcaagctgtaccgcccgaaggtggataacagtgcggttgggacgtcgaagaaagtcgacatggctgaggttaaggattggaaagcggttcgtgtggatctggtggtcgctccagatgagcagttcgcctatgcgaaactcggttggacgggcagcggcatgtttcgtcgcgatactcgtcgctacgcggaggaagagcgcgacatgctgctcgacaaccatggtctctacgacctgaaaaagggcatttttctgagtgcggacagcgaagaagagattttcggtcatctggacctggattatctggagccgtgggaacgcaacgcg

SEQ ID NO: 6458 - protein, 394 aa, synthetic construct
  REGION 1..394: note = Variant of terminal deoxynucleotidyl transferase
MHHHHHHGGSGHPEGNTPEKEVPSVIARHVSPYACQRKTTLNNYNKKITDALEIMAENYKFKENLQARLEARRAASVLKSLPFEVTSMKDIQGLPCITDDVRPVIEEIIEVGESSRVKEILNDERYKAFKQFTSVFGVGVKTAEKWYRMGLRTLEETKASKFLKLNKMQKAGFLYYEDLASGVTKEEKDAVLDIVKETVWTVDPDALVTIVGGFRRGKPQGHDVDLLITIPGRPTDPELLHNVVDLLKKQGLLLYGDIRERTFVEGQLPNPKPDQLDNHQKCFAILKLYRPKVDNSAVGTSKKVDMAEVKDWKAVRVDLVVAPDEQFAYAKLGWTGSGMFRRDTRRYAEEERDMLLDNHGLYDLKKGIFLSADSEEEIFGHLDLDYLEPWERNA

SEQ ID NO: 6459 - DNA, 1182 bp, synthetic construct
  misc_feature 1..1182: note = Variant of terminal deoxynucleotidyl transferase
  source 1..1182: mol_type = other DNA
atgcaccatcatcaccatcacgggggctccggccatccggaaggtaataccccggagaaggaggtgccgagcgttatcgcccgtcatgttagtccgtacgcgtgccagcgcaagaccacgctgaataactacaacaaaaagatcaccgacgcgctggagatcatggccgagaactacaagtctaaagagaacctgcaggcgcgcctggaggcccgtcgcgccgcgagtgtcctgaaaagcctgccgttcgaggttaccagcatgaaagacatccaaggtctgccgtgcattaccgacgacgtacgtcctgtgatcgaagagatcatcgaagtaggcgagagcagccgtgttaaagaaatcctcaatgacgagcgctacaaggcctttaagcagttcaccagcgtgttcggtgtgggcgtcaagaccgcggaaaagtggtaccgtatgggcctccgtacgctggaagaagtaaaggccagtaagttcctgaagctgaacaagatgcagaaggcgggcttcctgtactacgaggatctggcgagcggtgttacgaaagaagaaaaagatgccgttctggatatcgtgaaggaaacggtgtggactgttgatccggatgcgctggtgaccatcgtgggcggtttccgccgtggcaaacctcagggccacgacgttgacctgctgatcacgattccgggccgtcctacggatccggagctgctccacaacgtggttgatctgctcaagaagcaaggtctgctgctgtacggggacatccgtgagcgtacgttcgtggaggggcaactgccaaatcctaaacctgaccagctggacaatcatcagaagtgcttcgccattctcaagctgtaccgcccgaaggtggataacagtgcggttgggacgtcgaagaaagtcgacatggctgaggttaaggattggaaagcggttcgtgtggatctggtggtcgctccagatgagcagttcgcctatgcgaaactcggttggacgggcagcggcatgtttcgtcgcgatactcgtcgctacgcggaggaagagcgcgacatgctgctcgacaaccatggtctctacgacctgaaaaagggcatttttctgagtgcggacagcgaagaagagattttcggtcatctggacctggattatctggagccgtgggaacgcaacgcg

SEQ ID NO: 6460 - protein, 394 aa, synthetic construct
  REGION 1..394: note = Variant of terminal deoxynucleotidyl transferase
MHHHHHHGGSGHPEGNTPEKEVPSVIARHVSPYACQRKTTLNNYNKKITDALEIMAENYKSKENLQARLEARRAASVLKSLPFEVTSMKDIQGLPCITDDVRPVIEEIIEVGESSRVKEILNDERYKAFKQFTSVFGVGVKTAEKWYRMGLRTLEEVKASKFLKLNKMQKAGFLYYEDLASGVTKEEKDAVLDIVKETVWTVDPDALVTIVGGFRRGKPQGHDVDLLITIPGRPTDPELLHNVVDLLKKQGLLLYGDIRERTFVEGQLPNPKPDQLDNHQKCFAILKLYRPKVDNSAVGTSKKVDMAEVKDWKAVRVDLVVAPDEQFAYAKLGWTGSGMFRRDTRRYAEEERDMLLDNHGLYDLKKGIFLSADSEEEIFGHLDLDYLEPWERNA

SEQ ID NO: 6461 - DNA, 1182 bp, synthetic construct
  misc_feature 1..1182: note = Variant of terminal deoxynucleotidyl transferase
  source 1..1182: mol_type = other DNA
atgcaccatcatcaccatcacgggggctccggccatccggaaggtaataccccggagaaggaggtgccgagcgttatcgcccgtcatgttagtccgtacgcgtgccagcgcaagaccacgctgaataactacaacaaaaagatcaccgacgcgctggagatcatggccgagaactacaagtttaaagagaacctgcaggcgcgcctggaggcccgtcgcgccgcgagtgtcctgaaaagcctgccgttcgaggttaccagcatgaaagacatccaaggtctgccgtgcattaccgacgacgtacgtcctgtgatcgaagagatcatcgaagtaggcgagagcagccgtgttaaagaaatcctcaatgacgagcgctacaaggcctttaagcagttcaccagcgtgttcggtgtgggcgtcaagaccgcggaaaagtggtaccgtatgggcctccgtacgctgcctgaagtaaaggccagtaagttcctgaagctgaacaagatgcagaaggcgggcttcctgtactacgaggatctggcgagcggtgttacgaaagaagaaaaagatgccgttctggatatcgtgaaggaaacggtgtggactgttgatccggatgcgctggtgaccatcgtgggcggtttccgccgtggcaaacctcagggccacgacgttgacctgctgatcacgattccgggccgtcctacggatccggagctgctccacaacgtggttgatctgctcaagaagcaaggtctgctgctgtacggggacatccgtgagcgtacgttcgtggaggggcaactgccaaatcctaaacctgaccagctggacaatcatcagaagtgcttcgccattctcaagctgtaccgcccgaaggtggataacagtgcggttgggacgtcgaagaaagtcgacatggctgaggttaaggattggaaagcggttcgtgtggatctggtggtcgctccagatgagcagttcgcctatgcgaaactcggttggacgggcagcggcatgtttcgtcgcgatactcgtcgctacgcggaggaagagcgcgacatgctgctcgacaaccatggtctctacgacctgaaaaagggcatttttctgagtgcggacagcgaagaagagattttcggtcatctggacctggattatctggagccgtgggaacgcaacgcg

SEQ ID NO: 6462 - protein, 394 aa, synthetic construct
  REGION 1..394: note = Variant of terminal deoxynucleotidyl transferase
MHHHHHHGGSGHPEGNTPEKEVPSVIARHVSPYACQRKTTLNNYNKKITDALEIMAENYKFKENLQARLEARRAASVLKSLPFEVTSMKDIQGLPCITDDVRPVIEEIIEVGESSRVKEILNDERYKAFKQFTSVFGVGVKTAEKWYRMGLRTLPEVKASKFLKLNKMQKAGFLYYEDLASGVTKEEKDAVLDIVKETVWTVDPDALVTIVGGFRRGKPQGHDVDLLITIPGRPTDPELLHNVVDLLKKQGLLLYGDIRERTFVEGQLPNPKPDQLDNHQKCFAILKLYRPKVDNSAVGTSKKVDMAEVKDWKAVRVDLVVAPDEQFAYAKLGWTGSGMFRRDTRRYAEEERDMLLDNHGLYDLKKGIFLSADSEEEIFGHLDLDYLEPWERNA

SEQ ID NO: 6463 - DNA, 1182 bp, synthetic construct
  misc_feature 1..1182: note = Variant of terminal deoxynucleotidyl transferase
  source 1..1182: mol_type = other DNA
atgcaccatcatcaccatcacgggggctccggccatccggaaggtaataccccggagaaggaggtgccgagcgttatcgcccgtcatgttagtccgtacgcgtgccagcgcaagaccacgctgaataactacaacaaaaagatcaccgacgcgctggagatcatggccgagaactacaagtttaaagagaacctgcaggcgcgcctggaggcccgtcgcgccgcgagtgtcctgaaaagcctgccgttcgaggttaccagcatgaaagacatccaaggtctgccgtgcattaccgacgacgtacgtcctgtgatcgaagagatcatcgaagtaggcgagagcagccgtgttaaagaaatcctcaatgacgagcgctacaaggcctttaagcagttcaccagcgtgttcggtgtgggcgtcaagaccgcggaaaagtggtaccgtatgggcctccgtacgctggaagaagtaaaggccagtaagttcctgaagctgaacaagatgcagaaggcgggcttcctgtactacgaggatctggcgagcggtgttacgaaagaagaaaaagatgccgttctggatatcgtgaaggaaacggtgtggactgttgatccggatgcgctggtgaccatcgtgggcggtttccgccgtggcaaacctcagggccacgacgttgacctgctgatcacgattccgggccgtcctacggatccggagctgctccacaacgtggttgatctgctcaagaagcaaggtctgctgctgtacggggacatccgtgaggcgacgttcgtggaggggcaactgccaaatcctaaacctgaccagctggacaatcatcagaagtgcttcgccattctcaagctgtaccgcccgaaggtggataacagtgcggttgggacgtcgaagaaagtcgacatggctgaggttaaggattggaaagcggttcgtgtggatctggtggtcgctccagatgagcagttcgcctatgcgaaactcggttggacgggcagcggcatgtttcgtcgcgatactcgtcgctacgcggaggaagagcgcgacatgctgctcgacaaccatggtctctacgacctgaaaaagggcatttttctgagtgcggacagcgaagaagagattttcggtcatctggacctggattatctggagccgtgggaacgcaacgcg

SEQ ID NO: 6464 - protein, 394 aa, synthetic construct
  REGION 1..394: note = Variant of terminal deoxynucleotidyl transferase
MHHHHHHGGSGHPEGNTPEKEVPSVIARHVSPYACQRKTTLNNYNKKITDALEIMAENYKFKENLQARLEARRAASVLKSLPFEVTSMKDIQGLPCITDDVRPVIEEIIEVGESSRVKEILNDERYKAFKQFTSVFGVGVKTAEKWYRMGLRTLEEVKASKFLKLNKMQKAGFLYYEDLASGVTKEEKDAVLDIVKETVWTVDPDALVTIVGGFRRGKPQGHDVDLLITIPGRPTDPELLHNVVDLLKKQGLLLYGDIREATFVEGQLPNPKPDQLDNHQKCFAILKLYRPKVDNSAVGTSKKVDMAEVKDWKAVRVDLVVAPDEQFAYAKLGWTGSGMFRRDTRRYAEEERDMLLDNHGLYDLKKGIFLSADSEEEIFGHLDLDYLEPWERNA

SEQ ID NO: 6465 - DNA, 1182 bp, synthetic construct
  misc_feature 1..1182: note = Variant of terminal deoxynucleotidyl transferase
  source 1..1182: mol_type = other DNA
atgcaccatcatcaccatcacgggggctccggccatccggaaggtaataccccggagaaggaggtgccgagcgttatcgcccgtcatgttagtccgtacgcgtgccagcgcaagaccacgctgaataactacaacaaaaagatcaccgacgcgctggagatcatggccgagaactacaagtttaaagagaacctgcaggcgcgcctggaggcccgtcgcgccgcgagtgtcctgaaaagcctgccgttcgaggttaccagcatgaaagacatccaaggtctgccgtgcattaccgacgacgtacgtcctgtgatcgaagagatcatcgaagtaggcgagagcagccgtgttaaagaaatcctcaatgacgagcgctacaaggcctttaagcagttcaccagcgtgttcggtgtgggcgtcaagaccgcggaaaagtggtaccgtatgggcctccgtacgctggaagaagtaaaggccagtaagttcctgaagctgaacaagatgcagaaggcgggcttcctgtactacgaggatctggcgagcggtgttacgaaagaagaaaaagatgccgttctggatatcgtgaaggaaacggtgtggactgttgatccggatgcgctggtgaccatcgtgggcggtttccgccgtggcaaacctcagggccacgacgttgacctgctgatcacgattccgggccgtcctacggatccggagctgctccacaacgtggttgatctgctcaagaagcaaggtctgctgctgtacggggacatccgtgagcgtagtttcgtggaggggcaactgccaaatcctaaacctgaccagctggacaatcatcagaagtgcttcgccattctcaagctgtaccgcccgaaggtggataacagtgcggttgggacgtcgaagaaagtcgacatggctgaggttaaggattggaaagcggttcgtgtggatctggtggtcgctccagatgagcagttcgcctatgcgaaactcggttggacgggcagcggcatgtttcgtcgcgatactcgtcgctacgcggaggaagagcgcgacatgctgctcgacaaccatggtctctacgacctgaaaaagggcatttttctgagtgcggacagcgaagaagagattttcggtcatctggacctggattatctggagccgtgggaacgcaacgcg

SEQ ID NO: 6466 - protein, 394 aa, synthetic construct
  REGION 1..394: note = Variant of terminal deoxynucleotidyl transferase
MHHHHHHGGSGHPEGNTPEKEVPSVIARHVSPYACQRKTTLNNYNKKITDALEIMAENYKFKENLQARLEARRAASVLKSLPFEVTSMKDIQGLPCITDDVRPVIEEIIEVGESSRVKEILNDERYKAFKQFTSVFGVGVKTAEKWYRMGLRTLEEVKASKFLKLNKMQKAGFLYYEDLASGVTKEEKDAVLDIVKETVWTVDPDALVTIVGGFRRGKPQGHDVDLLITIPGRPTDPELLHNVVDLLKKQGLLLYGDIRERSFVEGQLPNPKPDQLDNHQKCFAILKLYRPKVDNSAVGTSKKVDMAEVKDWKAVRVDLVVAPDEQFAYAKLGWTGSGMFRRDTRRYAEEERDMLLDNHGLYDLKKGIFLSADSEEEIFGHLDLDYLEPWERNA

SEQ ID NO: 6467 - DNA, 1182 bp, synthetic construct
  misc_feature 1..1182: note = Variant of terminal deoxynucleotidyl transferase
  source 1..1182: mol_type = other DNA
atgcaccatcatcaccatcacgggggctccggccatccggaaggtaataccccggagaaggaggtgccgagcgttatcgcccgtcatgttagtccgtacgcgtgccagcgcaagaccacgctgaataactacaacaaaaagatcaccgacgcgctggagatcatggccgagaactacaagtttaaagagaacctgcaggcgcgcctggaggcccgtcgcgccgcgagtgtcctgaaaagcctgccgttcgaggttaccagcatgaaagacatccaaggtctgccgtgcattaccgacgacgtacgtcctgtgatcgaagagatcatcgaagtaggcgagagcagccgtgttaaagaaatcctcaatgacgagcgctacaaggcctttaagcagttcaccagcgtgttcggtgtgggcgtcaagaccgcggaaaagtggtaccgtatgggcctccgtacgctggaagaagtaaaggccagtaagttcctgaagctgaacaagatgcagaaggcgggcttcctgtactacgaggatctggcgagcggtgttacgaaagaagaaaaagatgccgttctggatatcgtgaaggaaacggtgtggactgttgatccggatgcgctggtgaccatcgtgggcggtttccgccgtggcaaaggtcagggccacgacgttgacctgctgatcacgattccgggccgtcctacggatccggagctgctccacaacgtggttgatctgctcaagaagcaaggtctgctgctgtacggggacatccgtgagcgtacgttcgtggaggggcaactgccaaatcctaaacctgaccagctggacaatcatcagaagtgcttcgccattctcaagctgtaccgcccgaaggtggataacagtgcggttgggacgtcgaagaaagtcgacatggctgaggttaaggattggaaagcggttcgtgtggatctggtggtcgctccagatgagcagttcgcctatgcgaaactcggttggacgggcagcggcatgtttcgtcgcgatactcgtcgctacgcggaggaagagcgcgacatgctgctcgacaaccatggtctctacgacctgaaaaagggcatttttctgagtgcggacagcgaagaagagattttcggtcatctggacctggattatctggagccgtgggaacgcaacgcg

SEQ ID NO: 6468 - protein, 394 aa, synthetic construct
  REGION 1..394: note = Variant of terminal deoxynucleotidyl transferase
MHHHHHHGGSGHPEGNTPEKEVPSVIARHVSPYACQRKTTLNNYNKKITDALEIMAENYKFKENLQARLEARRAASVLKSLPFEVTSMKDIQGLPCITDDVRPVIEEIIEVGESSRVKEILNDERYKAFKQFTSVFGVGVKTAEKWYRMGLRTLEEVKASKFLKLNKMQKAGFLYYEDLASGVTKEEKDAVLDIVKETVWTVDPDALVTIVGGFRRGKGQGHDVDLLITIPGRPTDPELLHNVVDLLKKQGLLLYGDIRERTFVEGQLPNPKPDQLDNHQKCFAILKLYRPKVDNSAVGTSKKVDMAEVKDWKAVRVDLVVAPDEQFAYAKLGWTGSGMFRRDTRRYAEEERDMLLDNHGLYDLKKGIFLSADSEEEIFGHLDLDYLEPWERNA

SEQ ID NO: 6469 - DNA, 1182 bp, synthetic construct
  misc_feature 1..1182: note = Variant of terminal deoxynucleotidyl transferase
  source 1..1182: mol_type = other DNA
atgcaccatcatcaccatcacgggggctccggccatccggaaggtaataccccggagaaggaggtgccgagcgttatcgcccgtcatgttagtccgtacgcgtgccagcgcaagaccacgctgaataactacaacaaaaagatcaccgacgcgctggagatcatggccgagaactacaagtttaaagagaacctgcaggcgcgcctggaggcccgtcgcgccgcgagtgtcctgaaaagcctgccgttcgaggttaccagcatgaaagacatccaaggtctgccgtgcattaccgacgacgtacgtcctgtgatcgaagagatcatcgaagtaggcgagagcagccgtgttaaagaaatcctcaatgacgagcgctacaaggcctttaagcagttcaccagcgtgttcggtgtgggcgtcaagaccgcggaaaagtggtaccgtatgggcctccgtacgctggcggaagtaaaggccagtaagttcctgaagctgaacaagatgcagaaggcgggcttcctgtactacgaggatctggcgagcggtgttacgaaagaagaaaaagatgccgttctggatatcgtgaaggaaacggtgtggactgttgatccggatgcgctggtgaccatcgtgggcggtttccgccgtggcaaacctcagggccacgacgttgacctgctgatcacgattccgggccgtcctacggatccggagctgctccacaacgtggttgatctgctcaagaagcaaggtctgctgctgtacggggacatccgtgagcgtacgttcgtggaggggcaactgccaaatcctaaacctgaccagctggacaatcatcagaagtgcttcgccattctcaagctgtaccgcccgaaggtggataacagtgcggttgggacgtcgaagaaagtcgacatggctgaggttaaggattggaaagcggttcgtgtggatctggtggtcgctccagatgagcagttcgcctatgcgaaactcggttggacgggcagcggcatgtttcgtcgcgatactcgtcgctacgcggaggaagagcgcgacatgctgctcgacaaccatggtctctacgacctgaaaaagggcatttttctgagtgcggacagcgaagaagagattttcggtcatctggacctggattatctggagccgtgggaacgcaacgcg

SEQ ID NO: 6470 - protein, 394 aa, synthetic construct
  REGION 1..394: note = Variant of terminal deoxynucleotidyl transferase
MHHHHHHGGSGHPEGNTPEKEVPSVIARHVSPYACQRKTTLNNYNKKITDALEIMAENYKFKENLQARLEARRAASVLKSLPFEVTSMKDIQGLPCITDDVRPVIEEIIEVGESSRVKEILNDERYKAFKQFTSVFGVGVKTAEKWYRMGLRTLAEVKASKFLKLNKMQKAGFLYYEDLASGVTKEEKDAVLDIVKETVWTVDPDALVTIVGGFRRGKPQGHDVDLLITIPGRPTDPELLHNVVDLLKKQGLLLYGDIRERTFVEGQLPNPKPDQLDNHQKCFAILKLYRPKVDNSAVGTSKKVDMAEVKDWKAVRVDLVVAPDEQFAYAKLGWTGSGMFRRDTRRYAEEERDMLLDNHGLYDLKKGIFLSADSEEEIFGHLDLDYLEPWERNA

SEQ ID NO: 6471 - DNA, 1182 bp, synthetic construct
  misc_feature 1..1182: note = Variant of terminal deoxynucleotidyl transferase
  source 1..1182: mol_type = other DNA
atgcaccatcatcaccatcacgggggctccggccatccggaaggtaataccccggagaaggaggtgccgagcgttatcgcccgtcatgttagtccgtacgcgtgccagcgcaagaccacgctgaataactacaacaaaaagatcaccgacgcgctggagatcatggccgagaactacaagtttaaagagaacctgcaggcgcgcctggaggcccgtcgcgccgcgagtgtcctgaaaagcctgccgttcgaggttaccagcatgaaagacatccaaggtctgccgtgcattaccgacgacgtacgtcctgtgatcgaagagatcatcgaagtaggcgagagcagccgtgttaaagaaatcctcaatgacgagcgctacaaggcctttaagcagttcaccagcgtgttcggtgtgggcgtcaagaccgcggaaaagtggtaccgtatgggcctccgtacgctggaagaagtaaaggccagtaagttcctgaagctgaacaagatgcagaaggcgggcttcctgtactacgaggatctggcgagcggtgttacgaaagaagaaaaagatgccgttctggatatcgtgaaggaaacggtgtggactgttgatccggatgcgctggtgaccatcgtgggcggtttccgccgtggcaaacctcagggccacgacgttgacctgctgatcacgattccgggccgtcctacggatccggagctgctccacaacgtggttgatctgctcaagaagcaaggtctgctgctgtacggggacatccgtgagcgtacgttcgtggaggggcaactgccaaatcctaaacctgaccagctggacaatcatcagaagtgcttcgccattctcaagctgtaccgcccgaaggtggataacagtgcggttgggacgtcgaagaaagtcgacatggctgaggttaaggattggaaagcggttcgtgtggatctggtggtctgtccagatgagcagttcgcctatgcgaaactcggttggacgggcagcggcatgtttcgtcgcgatactcgtcgctacgcggaggaagagcgcgacatgctgctcgacaaccatggtctctacgacctgaaaaagggcatttttctgagtgcggacagcgaagaagagattttcggtcatctggacctggattatctggagccgtgggaacgcaacgcg

SEQ ID NO: 6472 - protein, 394 aa, synthetic construct
  REGION 1..394: note = Variant of terminal deoxynucleotidyl transferase
MHHHHHHGGSGHPEGNTPEKEVPSVIARHVSPYACQRKTTLNNYNKKITDALEIMAENYKFKENLQARLEARRAASVLKSLPFEVTSMKDIQGLPCITDDVRPVIEEIIEVGESSRVKEILNDERYKAFKQFTSVFGVGVKTAEKWYRMGLRTLEEVKASKFLKLNKMQKAGFLYYEDLASGVTKEEKDAVLDIVKETVWTVDPDALVTIVGGFRRGKPQGHDVDLLITIPGRPTDPELLHNVVDLLKKQGLLLYGDIRERTFVEGQLPNPKPDQLDNHQKCFAILKLYRPKVDNSAVGTSKKVDMAEVKDWKAVRVDLVVCPDEQFAYAKLGWTGSGMFRRDTRRYAEEERDMLLDNHGLYDLKKGIFLSADSEEEIFGHLDLDYLEPWERNA

SEQ ID NO: 6473 - DNA, 1182 bp, synthetic construct
  misc_feature 1..1182: note = Variant of terminal deoxynucleotidyl transferase
  source 1..1182: mol_type = other DNA
atgcaccatcatcaccatcacgggggctccggccatccggaaggtaataccccggagaaggaggtgccgagcgttatcgcccgtcatgttagtccgtacgcgtgccagcgcaagaccacgctgaataactacaacaaaaagatcaccgacgcgctggagatcatggccgagaactacaagtttaaagagaacctgcaggcgcgcctggaggcccgtcgcgccgcgagtgtcctgaaaagcctgccgttcgaggttaccagcatgaaagacatccaaggtctgccgtgcattaccgacgacgtacgtcctgtgatcgaagagatcatcgaagtaggcgagagcagccgtgttaaagaaatcctcaatgacgagcgctacaaggcctttaagcagttcaccagcgtgttcggtgtgggcgtcaagaccgcggaaaagtggtaccgtatgggcctccgtacgctggaagaagtaaaggccagtaagttcctgaagctgaacaagatgcagaaggcgggcttcctgtactacgaggatctggcgagcggtgttacgaaagaagaaaaagatgccgttctggatatcgtgaaggaaacggtgtggactgttgatccggatgcgctggtgaccatcgtgggcggtttccgccgtggcaaacctcagggccacgacgttgacctgctgatcacgattccgggccgtcctacggatccggagctgctccacaacgtggttgatctgctcaagaagcaaggtctgctgctgtacggggacatccgtgagcgtacgttcgtggaggggcaactgccaaatcctaaacctgaccagctggacaatcatcagaagtgcttcgccattctcaagctgtaccgcccgaaggtggataacagtgcggttgggacgtcgaagaaagtcgacatggctgaggttaaggattggaaagcggttcgtgtggatctggtggtcgctccagatgagcagttcgcctatgcgaaactcggttggacgggcagcggcatgtttcgtcgcgatactcgtcgctacgcggaggaagagcgcgacatgctgctcgacaaccatggtctctacgacctgaaaaagggcatctttctgagtgcggttagcgaagaagagattttcggtcatctggacctggattatctggagccgtgggaacgcaacgcg

SEQ ID NO: 6474 - protein, 394 aa, synthetic construct
  REGION 1..394: note = Variant of terminal deoxynucleotidyl transferase
MHHHHHHGGSGHPEGNTPEKEVPSVIARHVSPYACQRKTTLNNYNKKITDALEIMAENYKFKENLQARLEARRAASVLKSLPFEVTSMKDIQGLPCITDDVRPVIEEIIEVGESSRVKEILNDERYKAFKQFTSVFGVGVKTAEKWYRMGLRTLEEVKASKFLKLNKMQKAGFLYYEDLASGVTKEEKDAVLDIVKETVWTVDPDALVTIVGGFRRGKPQGHDVDLLITIPGRPTDPELLHNVVDLLKKQGLLLYGDIRERTFVEGQLPNPKPDQLDNHQKCFAILKLYRPKVDNSAVGTSKKVDMAEVKDWKAVRVDLVVAPDEQFAYAKLGWTGSGMFRRDTRRYAEEERDMLLDNHGLYDLKKGIFLSAVSEEEIFGHLDLDYLEPWERNA

SEQ ID NO: 6475 - DNA, 1182 bp, synthetic construct
  misc_feature 1..1182: note = Variant of terminal deoxynucleotidyl transferase
  source 1..1182: mol_type = other DNA
atgcaccatcatcaccatcacgggggctccggccatccggaaggtaataccccggagaaggaggtgccgagcgttatcgcccgtcatgttagtccgtacgcgtgccagcgcaagaccacgctgaataactacaacaaaaagatcaccgacgcgctggagatcatggccgagaactacaagtttaaagagaacctgcaggcgcgcctggaggcccgtcgcgccgcgagtgtcctgaaaagcctgccgttcgaggttaccagcatgaaagacatccaaggtctgccgtgcattaccgacgacgtacgtcctgtgatcgaagagatcatcgaagtaggcgagagcagccgtgttaaagaaatcctcaatgacgagcgctacaaggcctttaagcagttcaccagcgtgttcggtgtgggcgtcaagaccgcggcgaagtggtaccgtatgggcctccgtacgctggaagaagtaaaggccagtaagttcctgaagctgaacaagatgcagaaggcgggcttcctgtactacgaggatctggcgagcggtgttacgaaagaagaaaaagatgccgttctggatatcgtgaaggaaacggtgtggactgttgatccggatgcgctggtgaccatcgtgggcggtttccgccgtggcaaacctcagggccacgacgttgacctgctgatcacgattccgggccgtcctacggatccggagctgctccacaacgtggttgatctgctcaagaagcaaggtctgctgctgtacggggacatccgtgagcgtacgttcgtggaggggcaactgccaaatcctaaacctgaccagctggacaatcatcagaagtgcttcgccattctcaagctgtaccgcccgaaggtggataacagtgcggttgggacgtcgaagaaagtcgacatggctgaggttaaggattggaaagcggttcgtgtggatctggtggtcgctccagatgagcagttcgcctatgcgaaactcggttggacgggcagcggcatgtttcgtcgcgatactcgtcgctacgcggaggaagagcgcgacatgctgctcgacaaccatggtctctacgacctgaaaaagggcatttttctgagtgcggacagcgaagaagagattttcggtcatctggacctggattatctggagccgtgggaacgcaacgcg

SEQ ID NO: 6476 - protein, 394 aa, synthetic construct
  REGION 1..394: note = Variant of terminal deoxynucleotidyl transferase
MHHHHHHGGSGHPEGNTPEKEVPSVIARHVSPYACQRKTTLNNYNKKITDALEIMAENYKFKENLQARLEARRAASVLKSLPFEVTSMKDIQGLPCITDDVRPVIEEIIEVGESSRVKEILNDERYKAFKQFTSVFGVGVKTAAKWYRMGLRTLEEVKASKFLKLNKMQKAGFLYYEDLASGVTKEEKDAVLDIVKETVWTVDPDALVTIVGGFRRGKPQGHDVDLLITIPGRPTDPELLHNVVDLLKKQGLLLYGDIRERTFVEGQLPNPKPDQLDNHQKCFAILKLYRPKVDNSAVGTSKKVDMAEVKDWKAVRVDLVVAPDEQFAYAKLGWTGSGMFRRDTRRYAEEERDMLLDNHGLYDLKKGIFLSADSEEEIFGHLDLDYLEPWERNA

SEQ ID NO: 6477 - DNA, 1182 bp, synthetic construct
  misc_feature 1..1182: note = Variant of terminal deoxynucleotidyl transferase
  source 1..1182: mol_type = other DNA
atgcaccatcatcaccatcacgggggctccggccatccggaaggtaataccccggagaaggaggtgccgagcgttatcgcccgtcatgttagtccgtacgcgtgccagcgcaagaccacgctgaataactacaacaaaaagatcaccgacgcgctggagatcatggccgagaactacaagtttaaagagaacctgcaggcgcgcctggaggcccgtcgcgccgcgagtgtcctgaaaagcctgccgttcgaggttaccagcatgaaagacatccaaggtctgccgtgcattaccgacgacgtacgtcctgtgatcgaagagatcatcgaagtaggcgagagcagccgtgttaaagaaatcctcaatgacgagcgctacaaggcctttaagcagttcaccagcgtgttcggtgtgggcgtcaagaccgcggaaaagtggtaccgtatgggcctccgtacgctggaagaagtaaaggccagtaagttcctgaagctgaacaagatgcagaaggcgggcttcctgtactacgaggatctggcgagcggtgttacgaaagaagaaaaagatgccgttctggatatcgtgaaggaaacggtgtggactgttgatccggatgcgctggtgaccatcgtgggcggtttccgccgtggcaaacctcagggccacgacgttgacctgctgatcacgattccgggccgtcctacggatccggagctgctccacaacgtggttgatctgctcaagaagcaaggtctgctgctgtacggggacatccgtgagcgtacgttcgtggaggggcaactgccaaatcctaaacctgaccagctggacaatcatcagaagtgcttcgccattctcaagctgtaccgcccgaaggtggataacagtgcggttgggacgtcgaagaaagtcgacatggctgaggttaaggattggaaagcggttcgtgtggattttgtggtcgctccagatgagcagttcgcctatgcgaaactcggttggacgggcagcggcatgtttcgtcgcgatactcgtcgctacgcggaggaagagcgcgacatgctgctcgacaaccatggtctctacgacctgaaaaagggcatttttctgagtgcggacagcgaagaagagattttcggtcatctggacctggattatctggagccgtgggaacgcaacgcg

SEQ ID NO: 6478 - protein, 394 aa, synthetic construct
  REGION 1..394: note = Variant of terminal deoxynucleotidyl transferase
MHHHHHHGGSGHPEGNTPEKEVPSVIARHVSPYACQRKTTLNNYNKKITDALEIMAENYKFKENLQARLEARRAASVLKSLPFEVTSMKDIQGLPCITDDVRPVIEEIIEVGESSRVKEILNDERYKAFKQFTSVFGVGVKTAEKWYRMGLRTLEEVKASKFLKLNKMQKAGFLYYEDLASGVTKEEKDAVLDIVKETVWTVDPDALVTIVGGFRRGKPQGHDVDLLITIPGRPTDPELLHNVVDLLKKQGLLLYGDIRERTFVEGQLPNPKPDQLDNHQKCFAILKLYRPKVDNSAVGTSKKVDMAEVKDWKAVRVDFVVAPDEQFAYAKLGWTGSGMFRRDTRRYAEEERDMLLDNHGLYDLKKGIFLSADSEEEIFGHLDLDYLEPWERNA

SEQ ID NO: 6479 - DNA, 1182 bp, synthetic construct
  misc_feature 1..1182: note = Variant of terminal deoxynucleotidyl transferase
  source 1..1182: mol_type = other DNA
atgcaccatcatcaccatcacgggggctccggccatccggaaggtaataccccggagaaggaggtgccgagcgttatcgcccgtcatgttagtccgtacgcgtgccagcgcaagaccacgctgaataactacaacaaaaagatcaccgacgcgctggagatcatggccgagaactacaagtttaaagagaacctgcaggcgcgcctggaggcccgtcgcgccgcgagtgtcctgaaaagcctgccgttcgaggttaccagcatgaaagacatccaaggtctgccgtgcattaccgacgacgtacgtcctgtgatcgaagagatcatcgaagtaggcgagagcagccgtgttaaagaaatcctcaatgacgagcgctacaaggcctttaagcagttcaccagcgtgttcggtgtgggcgtcaagaccgcggaaaagtggtaccgtatgggcctccgtacgctggaagaagtaaagggtagtaagttcctgaagctgaacaagatgcagaaggcgggcttcctgtactacgaggatctggcgagcggtgttacgaaagaagaaaaagatgccgttctggatatcgtgaaggaaacggtgtggactgttgatccggatgcgctggtgaccatcgtgggcggtttccgccgtggcaaacctcagggccacgacgttgacctgctgatcacgattccgggccgtcctacggatccggagctgctccacaacgtggttgatctgctcaagaagcaaggtctgctgctgtacggggacatccgtgagcgtacgttcgtggaggggcaactgccaaatcctaaacctgaccagctggacaatcatcagaagtgcttcgccattctcaagctgtaccgcccgaaggtggataacagtgcggttgggacgtcgaagaaagtcgacatggctgaggttaaggattggaaagcggttcgtgtggatctggtggtcgctccagatgagcagttcgcctatgcgaaactcggttggacgggcagcggcatgtttcgtcgcgatactcgtcgctacgcggaggaagagcgcgacatgctgctcgacaaccatggtctctacgacctgaaaaagggcatttttctgagtgcggacagcgaagaagagattttcggtcatctggacctggattatctggagccgtgggaacgcaacgcg

SEQ ID NO: 6480 - protein, 394 aa, synthetic construct
  REGION 1..394: note = Variant of terminal deoxynucleotidyl transferase
MHHHHHHGGSGHPEGNTPEKEVPSVIARHVSPYACQRKTTLNNYNKKITDALEIMAENYKFKENLQARLEARRAASVLKSLPFEVTSMKDIQGLPCITDDVRPVIEEIIEVGESSRVKEILNDERYKAFKQFTSVFGVGVKTAEKWYRMGLRTLEEVKGSKFLKLNKMQKAGFLYYEDLASGVTKEEKDAVLDIVKETVWTVDPDALVTIVGGFRRGKPQGHDVDLLITIPGRPTDPELLHNVVDLLKKQGLLLYGDIRERTFVEGQLPNPKPDQLDNHQKCFAILKLYRPKVDNSAVGTSKKVDMAEVKDWKAVRVDLVVAPDEQFAYAKLGWTGSGMFRRDTRRYAEEERDMLLDNHGLYDLKKGIFLSADSEEEIFGHLDLDYLEPWERNA

SEQ ID NO: 6481 - DNA, 1182 bp, synthetic construct
  misc_feature 1..1182: note = Variant of terminal deoxynucleotidyl transferase
  source 1..1182: mol_type = other DNA
atgcaccatcatcaccatcacgggggctccggccatccggaaggtaataccccggagaaggaggtgccgagcgttatcgcccgtcatgttagtccgtacgcgtgccagcgcaagaccacgctgaataactacaacaaaaagatcaccgacgcgctggagatcatggccgagaactacaagtttaaagagaacctgcaggcgcgcctggaggcccgtcgcgccgcgagtgtcctgaaaagcctgccgttcgaggttaccagcatgaaagacatccaaggtctgccgtgcattaccgacgacgtacgtcctgtgatcgaagagatcatcgaagtaggcgagagcagccgtgttaaagaaatcctcaatgacgagcgctacaaggcctttaagcagttcaccagcgtgttcggtgtgggcgtcaagaccgcggaaaagtggtaccgtatgggcctccgtacgctggaagaagtaatggccagtaagttcctgaagctgaacaagatgcagaaggcgggcttcctgtactacgaggatctggcgagcggtgttacgaaagaagaaaaagatgccgttctggatatcgtgaaggaaacggtgtggactgttgatccggatgcgctggtgaccatcgtgggcggtttccgccgtggcaaacctcagggccacgacgttgacctgctgatcacgattccgggccgtcctacggatccggagctgctccacaacgtggttgatctgctcaagaagcaaggtctgctgctgtacggggacatccgtgagcgtacgttcgtggaggggcaactgccaaatcctaaacctgaccagctggacaatcatcagaagtgcttcgccattctcaagctgtaccgcccgaaggtggataacagtgcggttgggacgtcgaagaaagtcgacatggctgaggttaaggattggaaagcggttcgtgtggatctggtggtcgctccagatgagcagttcgcctatgcgaaactcggttggacgggcagcggcatgtttcgtcgcgatactcgtcgctacgcggaggaagagcgcgacatgctgctcgacaaccatggtctctacgacctgaaaaagggcatttttctgagtgcggacagcgaagaagagattttcggtcatctggacctggattatctggagccgtgggaacgcaacgcg

SEQ ID NO: 6482 - protein, 394 aa, synthetic construct
  REGION 1..394: note = Variant of terminal deoxynucleotidyl transferase
MHHHHHHGGSGHPEGNTPEKEVPSVIARHVSPYACQRKTTLNNYNKKITDALEIMAENYKFKENLQARLEARRAASVLKSLPFEVTSMKDIQGLPCITDDVRPVIEEIIEVGESSRVKEILNDERYKAFKQFTSVFGVGVKTAEKWYRMGLRTLEEVMASKFLKLNKMQKAGFLYYEDLASGVTKEEKDAVLDIVKETVWTVDPDALVTIVGGFRRGKPQGHDVDLLITIPGRPTDPELLHNVVDLLKKQGLLLYGDIRERTFVEGQLPNPKPDQLDNHQKCFAILKLYRPKVDNSAVGTSKKVDMAEVKDWKAVRVDLVVAPDEQFAYAKLGWTGSGMFRRDTRRYAEEERDMLLDNHGLYDLKKGIFLSADSEEEIFGHLDLDYLEPWERNA

SEQ ID NO: 6483 - DNA, 1182 bp, synthetic construct
  misc_feature 1..1182: note = Variant of terminal deoxynucleotidyl transferase
  source 1..1182: mol_type = other DNA
atgcaccatcatcaccatcacgggggctccggccatccggaaggtaataccccggagaaggaggtgccgagcgttatcgcccgtcatgttagtccgtacgcgtgccagcgcaagaccacgctgaataactacaacaaaaagatcaccgacgcgctggagatcatggccgagaactacaagtttaaagagaacctgcaggcgcgcctggaggcccgtcgcgccgcgagtgtcctgaaaagcctgccgttcgaggttaccagcatgaaagacatccaaggtctgccgtgcattaccgacgacgtacgtcctgtgatcgaagagatcatcgaagtaggcgagagcagccgtgttaaagaaatcctcaatgacgagcgctacaaggcctttaagcagttcaccagcgtgttcggtgtgggcgtcaagaccgcggaaaagtggtaccgtatgggcctccgtacgctggaagaagtaaaggccagtaagttcctgaagctgaacaagatgcagaaggcgggcttcctgtactacgaggatctggcgagcggtgttacgaaagaagaaaaagatgccgttctggatatcgtgaaggaaacggtgtggactgttgatccggatgcgctggtgaccatcgtgggcggtttccgccgtggcaaacctcagggccacgacgttgacctgctgatcacgattccgggccgtcctacggatccggagctgctccacaacgtggttgatctgctcaagaagcaaggtctgctgctgtacggggacatccgtgagcgtacgttcgtggaggggcaactgccaaatcctaaacctgaccagctggacaatcatcagaagtgcttcgccattctcaagctgtaccgcccgaaggtggataacagtgcggttgggacgtcgaagaaagtcgacatggctgaggttaaggattggaaagcggttcgtgtggatctggtggtcgctccaggggagcagttcgcctatgcgaaactcggttggacgggcagcggcatgtttcgtcgcgatactcgtcgctacgcggaggaagagcgcgacatgctgctcgacaaccatggtctctacgacctgaaaaagggcatttttctgagtgcggacagcgaagaagagattttcggtcatctggacctggattatctggagccgtgggaacgcaacgcg

SEQ ID NO: 6484 - protein, 394 aa, synthetic construct
  REGION 1..394: note = Variant of terminal deoxynucleotidyl transferase
MHHHHHHGGSGHPEGNTPEKEVPSVIARHVSPYACQRKTTLNNYNKKITDALEIMAENYKFKENLQARLEARRAASVLKSLPFEVTSMKDIQGLPCITDDVRPVIEEIIEVGESSRVKEILNDERYKAFKQFTSVFGVGVKTAEKWYRMGLRTLEEVKASKFLKLNKMQKAGFLYYEDLASGVTKEEKDAVLDIVKETVWTVDPDALVTIVGGFRRGKPQGHDVDLLITIPGRPTDPELLHNVVDLLKKQGLLLYGDIRERTFVEGQLPNPKPDQLDNHQKCFAILKLYRPKVDNSAVGTSKKVDMAEVKDWKAVRVDLVVAPGEQFAYAKLGWTGSGMFRRDTRRYAEEERDMLLDNHGLYDLKKGIFLSADSEEEIFGHLDLDYLEPWERNA

SEQ ID NO: 6485 - DNA, 1182 bp, synthetic construct
  misc_feature 1..1182: note = Variant of terminal deoxynucleotidyl transferase
  source 1..1182: mol_type = other DNA
atgcaccatcatcaccatcacgggggctccggccatccggaaggtaataccccggagaaggaggtgccgagcgttatcgcccgtcatgttagtccgtacgcgtgccagcgcaagaccacgctgaataactacaacaaaaagatcaccgacgcgctggagatcatggccgagaactacaagtttaaagagaacctgcaggcgcgcctggaggcccgtcgcgccgcgagtgtcctgaaaagcctgccgttcgaggttaccagcatgaaagacatccaaggtctgccgtgcattaccgacgacgtacgtcctgtgatcgaagagatcatcgaagtaggcgagagcagccgtgttaaagaaatcctcaatgacgagcgctacaaggcctttaagcagttcaccagcgtgttcggtgtgggcgtcaagaccgcggaaaagtggtaccgtatgggcctccgtacgctggaagaagtagcggccagtaagttcctgaagctgaacaagatgcagaaggcgggcttcctgtactacgaggatctggcgagcggtgttacgaaagaagaaaaagatgccgttctggatatcgtgaaggaaacggtgtggactgttgatccggatgcgctggtgaccatcgtgggcggtttccgccgtggcaaacctcagggccacgacgttgacctgctgatcacgattccgggccgtcctacggatccggagctgctccacaacgtggttgatctgctcaagaagcaaggtctgctgctgtacggggacatccgtgagcgtacgttcgtggaggggcaactgccaaatcctaaacctgaccagctggacaatcatcagaagtgcttcgccattctcaagctgtaccgcccgaaggtggataacagtgcggttgggacgtcgaagaaagtcgacatggctgaggttaaggattggaaagcggttcgtgtggatctggtggtcgctccagatgagcagttcgcctatgcgaaactcggttggacgggcagcggcatgtttcgtcgcgatactcgtcgctacgcggaggaagagcgcgacatgctgctcgacaaccatggtctctacgacctgaaaaagggcatttttctgagtgcggacagcgaagaagagattttcggtcatctggacctggattatctggagccgtgggaacgcaacgcg

SEQ ID NO: 6486 - protein, 394 aa, synthetic construct
  REGION 1..394: note = Variant of terminal deoxynucleotidyl transferase
MHHHHHHGGSGHPEGNTPEKEVPSVIARHVSPYACQRKTTLNNYNKKITDALEIMAENYKFKENLQARLEARRAASVLKSLPFEVTSMKDIQGLPCITDDVRPVIEEIIEVGESSRVKEILNDERYKAFKQFTSVFGVGVKTAEKWYRMGLRTLEEVAASKFLKLNKMQKAGFLYYEDLASGVTKEEKDAVLDIVKETVWTVDPDALVTIVGGFRRGKPQGHDVDLLITIPGRPTDPELLHNVVDLLKKQGLLLYGDIRERTFVEGQLPNPKPDQLDNHQKCFAILKLYRPKVDNSAVGTSKKVDMAEVKDWKAVRVDLVVAPDEQFAYAKLGWTGSGMFRRDTRRYAEEERDMLLDNHGLYDLKKGIFLSADSEEEIFGHLDLDYLEPWERNA

SEQ ID NO: 6487 - DNA, 1182 bp, synthetic construct
  misc_feature 1..1182: note = Variant of terminal deoxynucleotidyl transferase
  source 1..1182: mol_type = other DNA
atgcaccatcatcaccatcacgggggctccggccatccggaaggtaataccccggagaaggaggtgccgagcgttatcgcccgtcatgttagtccgtacgcgtgccagcgcaagaccacgctgaataactacaacaaaaagatcaccgacgcgctggagatcatggccgagaactacaagtttaaagagaacctgcaggcgcgcctggaggcccgtcgcgccgcgagtgtcctgaaaagcctgccgttcgaggttaccagcatgaaagacatccaaggtctgccgtgcattaccgacgacgtacgtcctgtgatcgaagagatcatcgaagtaggcgagagcagccgtgttaaagaaatcctcaatgacgagcgctacaaggcctttaagcagttcaccagcgtgttcggtgtgggcgtcaagaccgcggaaaagtggtaccgtatgggcctccgtacgctggaagaagtaaaggccagtaagttcctgaagctgaacaagatgcagaaggcgggcttcctgtactacgaggatctggcgagcggtgttacgaaagaagaaaaagatgccgttctggatatcgtgaaggaaacggtgtggactgttgatccggatgcgctggtgaccatcgtgggcggtttccgccgtggcaaacctcagggccacgacgttgacctgctgcttacgattccgggccgtcctacggatccggagctgctccacaacgtggttgatctgctcaagaagcaaggtctgctgctgtacggggacatccgtgagcgtacgttcgtggaggggcaactgccaaatcctaaacctgaccagctggacaatcatcagaagtgcttcgccattctcaagctgtaccgcccgaaggtggataacagtgcggttgggacgtcgaagaaagtcgacatggctgaggttaaggattggaaagcggttcgtgtggatctggtggtcgctccagatgagcagttcgcctatgcgaaactcggttggacgggcagcggcatgtttcgtcgcgatactcgtcgctacgcggaggaagagcgcgacatgctgctcgacaaccatggtctctacgacctgaaaaagggcatttttctgagtgcggacagcgaagaagagattttcggtcatctggacctggattatctggagccgtgggaacgcaacgcg

SEQ ID NO: 6488 - protein, 394 aa, synthetic construct
  REGION 1..394: note = Variant of terminal deoxynucleotidyl transferase
MHHHHHHGGSGHPEGNTPEKEVPSVIARHVSPYACQRKTTLNNYNKKITDALEIMAENYKFKENLQARLEARRAASVLKSLPFEVTSMKDIQGLPCITDDVRPVIEEIIEVGESSRVKEILNDERYKAFKQFTSVFGVGVKTAEKWYRMGLRTLEEVKASKFLKLNKMQKAGFLYYEDLASGVTKEEKDAVLDIVKETVWTVDPDALVTIVGGFRRGKPQGHDVDLLLTIPGRPTDPELLHNVVDLLKKQGLLLYGDIRERTFVEGQLPNPKPDQLDNHQKCFAILKLYRPKVDNSAVGTSKKVDMAEVKDWKAVRVDLVVAPDEQFAYAKLGWTGSGMFRRDTRRYAEEERDMLLDNHGLYDLKKGIFLSADSEEEIFGHLDLDYLEPWERNA

SEQ ID NO: 6489 - DNA, 1182 bp, synthetic construct
  misc_feature 1..1182: note = Variant of terminal deoxynucleotidyl transferase
  source 1..1182: mol_type = other DNA
atgcaccatcatcaccatcacgggggctccggccatccggaaggtaataccccggagaaggaggtgccgagcgttatcgcccgtcatgttagtccgtacgcgtgccagcgcaagaccacgctgaataactacaacaaaaagatcaccgacgcgctggagatcatggccgagaactacaagtttaaagagaacctgcaggcgcgcctggaggcccgtcgcgccgcgagtgtcctgaaaagcctgccgttcgaggttaccagcatgaaagacatccaaggtctgccgtgcattaccgacgacgtacgtcctgtgatcgaagagatcatcgaagtaggcgagagcagccgtgttaaagaaatcctcaatgacgagcgctacaaggcctttaagcagttcaccagcgtgttcggtgtgggcgtcaagaccgcggaaaagtggtaccgtatgggcctccgtacgctggaagaagtaaaggccagtaagttcctgaagctgaacaagatgcagaaggcgggcttcctgtactacgaggatctggcgagcggtgttacgaaagaagaaaaagatgccgttctggatatcgtgaaggaaacggtgtggactgttgatccggatgcgctggtgaccatcgtgggcggtttccgccgtggcaaacctcagggccacgacgttgacctgctgatcacgattccgggccgtcctacggatccggagctgctccacaacgtggttgatctgctcaagaagcaaggtctgctgctgtacggggacatccgtgagaatacgttcgtggaggggcaactgccaaatcctaaacctgaccagctggacaatcatcagaagtgcttcgccattctcaagctgtaccgcccgaaggtggataacagtgcggttgggacgtcgaagaaagtcgacatggctgaggttaaggattggaaagcggttcgtgtggatctggtggtcgctccagatgagcagttcgcctatgcgaaactcggttggacgggcagcggcatgtttcgtcgcgatactcgtcgctacgcggaggaagagcgcgacatgctgctcgacaaccatggtctctacgacctgaaaaagggcatttttctgagtgcggacagcgaagaagagattttcggtcatctggacctggattatctggagccgtgggaacgcaacgcg

SEQ ID NO: 6490 - protein, 394 aa, synthetic construct
  REGION 1..394: note = Variant of terminal deoxynucleotidyl transferase
MHHHHHHGGSGHPEGNTPEKEVPSVIARHVSPYACQRKTTLNNYNKKITDALEIMAENYKFKENLQARLEARRAASVLKSLPFEVTSMKDIQGLPCITDDVRPVIEEIIEVGESSRVKEILNDERYKAFKQFTSVFGVGVKTAEKWYRMGLRTLEEVKASKFLKLNKMQKAGFLYYEDLASGVTKEEKDAVLDIVKETVWTVDPDALVTIVGGFRRGKPQGHDVDLLITIPGRPTDPELLHNVVDLLKKQGLLLYGDIRENTFVEGQLPNPKPDQLDNHQKCFAILKLYRPKVDNSAVGTSKKVDMAEVKDWKAVRVDLVVAPDEQFAYAKLGWTGSGMFRRDTRRYAEEERDMLLDNHGLYDLKKGIFLSADSEEEIFGHLDLDYLEPWERNA

SEQ ID NO: 6491 - DNA, 1182 bp, synthetic construct
  misc_feature 1..1182: note = Variant of terminal deoxynucleotidyl transferase
  source 1..1182: mol_type = other DNA
atgcaccatcatcaccatcacgggggctccggccatccggaaggtaataccccggagaaggaggtgccgagcgttatcgcccgtcatgttagtccgtacgcgtgccagcgcaagaccacgctgaataactacaacaaaaagatcaccgacgcgctggagatcatggccgagaactacaagtttaaagagaacctgcaggcgcgcctggaggcccgtcgcgccgcgagtgtcctgaaaagcctgccgttcgaggttaccagcatgaaagacatccaaggtctgccgtgcattaccgacgacgtacgtcctgtgatcgaagagatcatcgaagtaggcgagagcagccgtgttaaagaaatcctcaatgacgagcgctacaaggcctttaagcagttcaccagcgtgttcggtgtgggcgtcaagaccgcggaaaagtggtaccgtatgggcctccgtacgctggaagaagtaaaggccagtaagttcctgaagctgaacaagatgcagaaggcgggcttcctgtactacgaggatctggcgagcggtgttacgaaagaagaaaaagatgccgttctggatatcgtgaaggaaacggtgtggactgttgatccggatgcgctggtgaccatcgtgggcggtttccgccgtggcaaacctcagggccacgacgttgacctgctgatcacgattccgggccgtcctacggatccggagctgctccacaacgtggttgatctgctcaagaagcaaggtctgctgctgtacggggacatccgtgagcgtacgttcgtggaggggcaactgccaaatcctaaacctgaccagctggacaatcatcagaagtgcttcgccattctcaagctgtaccgcccgaaggtggataacagtgcggttgggacgtcgaagaaagtcgacatggctgaggttaaggattggaaagcggttcgtgtggatctggtggtcgctccagatgagcagtctgcctatgcgaaactcggttggacgggcagcggcatgtttcgtcgcgatactcgtcgctacgcggaggaagagcgcgacatgctgctcgacaaccatggtctctacgacctgaaaaagggcatttttctgagtgcggacagcgaagaagagattttcggtcatctggacctggattatctggagccgtgggaacgcaacgcg

SEQ ID NO: 6492 - protein, 394 aa, synthetic construct
  REGION 1..394: note = Variant of terminal deoxynucleotidyl transferase
MHHHHHHGGSGHPEGNTPEKEVPSVIARHVSPYACQRKTTLNNYNKKITDALEIMAENYKFKENLQARLEARRAASVLKSLPFEVTSMKDIQGLPCITDDVRPVIEEIIEVGESSRVKEILNDERYKAFKQFTSVFGVGVKTAEKWYRMGLRTLEEVKASKFLKLNKMQKAGFLYYEDLASGVTKEEKDAVLDIVKETVWTVDPDALVTIVGGFRRGKPQGHDVDLLITIPGRPTDPELLHNVVDLLKKQGLLLYGDIRERTFVEGQLPNPKPDQLDNHQKCFAILKLYRPKVDNSAVGTSKKVDMAEVKDWKAVRVDLVVAPDEQSAYAKLGWTGSGMFRRDTRRYAEEERDMLLDNHGLYDLKKGIFLSADSEEEIFGHLDLDYLEPWERNA

SEQ ID NO: 6493 - DNA, 1182 bp, synthetic construct
  misc_feature 1..1182: note = Variant of terminal deoxynucleotidyl transferase
  source 1..1182: mol_type = other DNA
atgcaccatcatcaccatcacgggggctccggccatccggaaggtaataccccggagaaggaggtgccgagcgttatcgcccgtcatgttagtccgtacgcgtgccagcgcaagaccacgctgaataactacaacaaaaagatcaccgacgcgctggagatcatggccgagaactacaagtttaaagagaacctgcaggcgcgcctggaggcccgtcgcgccgcgagtgtcctgaaaagcctgccgttcgaggttaccagcatgaaagacatccaaggtctgccgtgcattaccgacgacgtacgtcctgtgatcgaagagatcatcgaagtaggcgagagcagccgtgttaaagaaatcctcaatgacgagcgctacaagaagtttaagcagttcaccagcgtgttcggtgtgggcgtcaagaccgcggaaaagtggtaccgtatgggcctccgtacgctggaagaagtaaaggccagtaagttcctgaagctgaacaagatgcagaaggcgggcttcctgtactacgaggatctggcgagcggtgttacgaaagaagaaaaagatgccgttctggatatcgtgaaggaaacggtgtggactgttgatccggatgcgctggtgaccatcgtgggcggtttccgccgtggcaaacctcagggccacgacgttgacctgctgatcacgattccgggccgtcctacggatccggagctgctccacaacgtggttgatctgctcaagaagcaaggtctgctgctgtacggggacatccgtgagcgtacgttcgtggaggggcaactgccaaatcctaaacctgaccagctggacaatcatcagaagtgcttcgccattctcaagctgtaccgcccgaaggtggataacagtgcggttgggacgtcgaagaaagtcgacatggctgaggttaaggattggaaagcggttcgtgtggatctggtggtcgctccagatgagcagttcgcctatgcgaaactcggttggacgggcagcggcatgtttcgtcgcgatactcgtcgctacgcggaggaagagcgcgacatgctgctcgacaaccatggtctctacgacctgaaaaagggcatttttctgagtgcggacagcgaagaagagattttcggtcatctggacctggattatctggagccgtgggaacgcaacgcg

SEQ ID NO: 6494 - protein, 394 aa, synthetic construct
  REGION 1..394: note = Variant of terminal deoxynucleotidyl transferase
MHHHHHHGGSGHPEGNTPEKEVPSVIARHVSPYACQRKTTLNNYNKKITDALEIMAENYKFKENLQARLEARRAASVLKSLPFEVTSMKDIQGLPCITDDVRPVIEEIIEVGESSRVKEILNDERYKKFKQFTSVFGVGVKTAEKWYRMGLRTLEEVKASKFLKLNKMQKAGFLYYEDLASGVTKEEKDAVLDIVKETVWTVDPDALVTIVGGFRRGKPQGHDVDLLITIPGRPTDPELLHNVVDLLKKQGLLLYGDIRERTFVEGQLPNPKPDQLDNHQKCFAILKLYRPKVDNSAVGTSKKVDMAEVKDWKAVRVDLVVAPDEQFAYAKLGWTGSGMFRRDTRRYAEEERDMLLDNHGLYDLKKGIFLSADSEEEIFGHLDLDYLEPWERNA

SEQ ID NO: 6495 - DNA, 1182 bp, synthetic construct
  misc_feature 1..1182: note = Variant of terminal deoxynucleotidyl transferase
  source 1..1182: mol_type = other DNA
atgcaccatcatcaccatcacgggggctccggccatccggaaggtaataccccggagaaggaggtgccgagcgttatcgcccgtcatgttagtccgtacgcgtgccagcgcaagaccacgctgaataactacaacaaaaagatcaccgacgcgctggagatcatggccgagaactacaagtttaaagagaacctgcaggcgcgcctggaggcccgtcgcgccgcgagtgtcctgaaaagcctgccgttcgaggttaccagcatgaaagacatccaaggtctgccgtgcattaccgacgacgtacgtcctgtgatcgaagagatcatcgaagtaggcgagagcagccgtgttaaagaaatcctcaatgacgagcgctacaaggcctttaagcagttcaccagcgtgttcggtgtgggcgtcaagaccgcggaaaagtggtaccgtatgggcctccgtacgctgcttgaagtaaaggccagtaagttcctgaagctgaacaagatgcagaaggcgggcttcctgtactacgaggatctggcgagcggtgttacgaaagaagaaaaagatgccgttctggatatcgtgaaggaaacggtgtggactgttgatccggatgcgctggtgaccatcgtgggcggtttccgccgtggcaaacctcagggccacgacgttgacctgctgatcacgattccgggccgtcctacggatccggagctgctccacaacgtggttgatctgctcaagaagcaaggtctgctgctgtacggggacatccgtgagcgtacgttcgtggaggggcaactgccaaatcctaaacctgaccagctggacaatcatcagaagtgcttcgccattctcaagctgtaccgcccgaaggtggataacagtgcggttgggacgtcgaagaaagtcgacatggctgaggttaaggattggaaagcggttcgtgtggatctggtggtcgctccagatgagcagttcgcctatgcgaaactcggttggacgggcagcggcatgtttcgtcgcgatactcgtcgctacgcggaggaagagcgcgacatgctgctcgacaaccatggtctctacgacctgaaaaagggcatttttctgagtgcggacagcgaagaagagattttcggtcatctggacctggattatctggagccgtgggaacgcaacgcg

SEQ ID NO: 6496 - protein, 394 aa, synthetic construct
  REGION 1..394: note = Variant of terminal deoxynucleotidyl transferase
MHHHHHHGGSGHPEGNTPEKEVPSVIARHVSPYACQRKTTLNNYNKKITDALEIMAENYKFKENLQARLEARRAASVLKSLPFEVTSMKDIQGLPCITDDVRPVIEEIIEVGESSRVKEILNDERYKAFKQFTSVFGVGVKTAEKWYRMGLRTLLEVKASKFLKLNKMQKAGFLYYEDLASGVTKEEKDAVLDIVKETVWTVDPDALVTIVGGFRRGKPQGHDVDLLITIPGRPTDPELLHNVVDLLKKQGLLLYGDIRERTFVEGQLPNPKPDQLDNHQKCFAILKLYRPKVDNSAVGTSKKVDMAEVKDWKAVRVDLVVAPDEQFAYAKLGWTGSGMFRRDTRRYAEEERDMLLDNHGLYDLKKGIFLSADSEEEIFGHLDLDYLEPWERNA

SEQ ID NO: 6497 - DNA, 1182 bp, synthetic construct
  misc_feature 1..1182: note = Variant of terminal deoxynucleotidyl transferase
  source 1..1182: mol_type = other DNA
atgcaccatcatcaccatcacgggggctccggccatccggaaggtaataccccggagaaggaggtgccgagcgttatcgcccgtcatgttagtccgtacgcgtgccagcgcaagaccacgctgaataactacaacaaaaagatcaccgacgcgctggagatcatggccgagaactacaagtttaaagagaacctgcaggcgcgcctggaggcccgtcgcgccgcgagtgtcctgaaaagcctgccgttcgaggttaccagcatgaaagacatccaaggtctgccgtgcattaccgacgacgtacgtcctgtgatcgaagagatcatcgaagtaggcgagagcagccgtgttaaagaaatcctcaatgacgagcgctacaaggcctttaagcagttcaccagcgtgttcggtgtgggcgtcaagaccgcggaaaagtggtaccgtatgggcctccgtacgctggaagaagtaaaggccagtaagttcctgaagctgaacaagatgcagaaggcgggcttcctgtactacgaggatctggcgagcggtgttacgaaagaagaaaaagatgccgttctggatatcgtgaaggaaacggtgtggactgttgatccggatgcgctggtgaccatcgtgggcggtttccgccgtggcaaacctcagggccacgacgttgacctgctgatcacgattccgggccgtcctacggatccggagctgctccacaacgtggttgatctgctcaagaagcaaggtctgctgctgtacggggacatccgtgagcgtacgttcgtggaggggcaactgccaaatcctaaacctgaccagctggacaatcatcagaagtgcttcgccattctcaagctgtaccgcccgaaggtggataacagtgcggttgggacgtcgaagaaagtcgacatggctgaggttaaggattggaaagcggttcgtgtggatctggtggtcgctccagatgagcagttcgcctatgcgaaactcggttggacgggcagcggcatgtttcgtcgcgatactcgtcgctacgcggaggaagagcgcgacatgctgctcgacaaccatggtctctacgacctgaaaaagggcatctttctgagggcggacagcgaagaagagattttcggtcatctggacctggattatctggagccgtgggaacgcaacgcg

SEQ ID NO: 6498 - protein, 394 aa, synthetic construct
  REGION 1..394: note = Variant of terminal deoxynucleotidyl transferase
MHHHHHHGGSGHPEGNTPEKEVPSVIARHVSPYACQRKTTLNNYNKKITDALEIMAENYKFKENLQARLEARRAASVLKSLPFEVTSMKDIQGLPCITDDVRPVIEEIIEVGESSRVKEILNDERYKAFKQFTSVFGVGVKTAEKWYRMGLRTLEEVKASKFLKLNKMQKAGFLYYEDLASGVTKEEKDAVLDIVKETVWTVDPDALVTIVGGFRRGKPQGHDVDLLITIPGRPTDPELLHNVVDLLKKQGLLLYGDIRERTFVEGQLPNPKPDQLDNHQKCFAILKLYRPKVDNSAVGTSKKVDMAEVKDWKAVRVDLVVAPDEQFAYAKLGWTGSGMFRRDTRRYAEEERDMLLDNHGLYDLKKGIFLRADSEEEIFGHLDLDYLEPWERNA

SEQ ID NO: 6499 - DNA, 1182 bp, synthetic construct
  misc_feature 1..1182: note = Variant of terminal deoxynucleotidyl transferase
  source 1..1182: mol_type = other DNA
atgcaccatcatcaccatcacgggggctccggccatccggaaggtaataccccggagaaggaggtgccgagcgttatcgcccgtcatgttagtccgtacgcgtgccagcgcaagaccacgctgaataactacaacaaaaagatcaccgacgcgctggagatcatggccgagaactacaagtttaaagagaacctgcaggcgcgcctggaggcccgtcgcgccgcgagtgtcctgaaaagcctgccgttcgaggttaccagcatgaaagacatccaaggtctgccgtgcattaccgacgacgtacgtcctgtgatcgaagagatcatcgaagtaggcgagagcagccgtgttaaagaaatcctcaatgacgagcgctacaaggcctttaagcagttcaccagcgtgttcggtgtgggcgtcaagaccgcggaaaagtggtaccgtatgggcctccgtacgctggaagaagtaaaggccagtaagttcctgaagctgaacaagatgcagaaggcgggcttcctgtactacgaggatctggcgagcggtgttacgaaagaagaaaaagatgccgttctggatatcgtgaaggaaacggtgtggactgttgatccggatgcgctggtgaccatcgtgggcggtttccgccgtggcaaacctcagggccacgacgttgacctgctgatcacgattccgggccgtcctacggatccggagctgctccacaacgtggttgatctgctcaagaagcaaggtctgctgctgtacggggacatccgtgagcgtacgttcgtggaggggcaactgccatgtcctaaacctgaccagctggacaatcatcagaagtgcttcgccattctcaagctgtaccgcccgaaggtggataacagtgcggttgggacgtcgaagaaagtcgacatggctgaggttaaggattggaaagcggttcgtgtggatctggtggtcgctccagatgagcagttcgcctatgcgaaactcggttggacgggcagcggcatgtttcgtcgcgatactcgtcgctacgcggaggaagagcgcgacatgctgctcgacaaccatggtctctacgacctgaaaaagggcatttttctgagtgcggacagcgaagaagagattttcggtcatctggacctggattatctggagccgtgggaacgcaacgcg

SEQ ID NO: 6500 - protein, 394 aa, synthetic construct
  REGION 1..394: note = Variant of terminal deoxynucleotidyl transferase
MHHHHHHGGSGHPEGNTPEKEVPSVIARHVSPYACQRKTTLNNYNKKITDALEIMAENYKFKENLQARLEARRAASVLKSLPFEVTSMKDIQGLPCITDDVRPVIEEIIEVGESSRVKEILNDERYKAFKQFTSVFGVGVKTAEKWYRMGLRTLEEVKASKFLKLNKMQKAGFLYYEDLASGVTKEEKDAVLDIVKETVWTVDPDALVTIVGGFRRGKPQGHDVDLLITIPGRPTDPELLHNVVDLLKKQGLLLYGDIRERTFVEGQLPCPKPDQLDNHQKCFAILKLYRPKVDNSAVGTSKKVDMAEVKDWKAVRVDLVVAPDEQFAYAKLGWTGSGMFRRDTRRYAEEERDMLLDNHGLYDLKKGIFLSADSEEEIFGHLDLDYLEPWERNA

SEQ ID NO: 6501 - DNA, 1182 bp, synthetic construct
  misc_feature 1..1182: note = Variant of terminal deoxynucleotidyl transferase
  source 1..1182: mol_type = other DNA
atgcaccatcatcaccatcacgggggctccggccatccggaaggtaataccccggagaaggaggtgccgagcgttatcgcccgtcatgttagtccgtacgcgtgccagcgcaagaccacgctgaataactacaacaaaaagatcaccgacgcgctggagatcatggccgagaactacaagtttaaagagaacctgcaggcgcgcctggaggcccgtcgcgccgcgagtgtcctgaaaagcctgccgttcgaggttaccagcatgaaagacatccaaggtctgccgtgcattaccgacgacgtacgtcctgtgatcgaagagatcatcgaagtaggcgagagcagccgtgttaaagaaatcctcaatgacgagcgctacaaggcctttaagcagttcaccagcgtgttcggtgtgggcgtcaagaccgcggaaaagtggtaccgtacgggcctccgtacgctggaagaagtaaaggccagtaagttcctgaagctgaacaagatgcagaaggcgggcttcctgtactacgaggatctggcgagcggtgttacgaaagaagaaaaagatgccgttctggatatcgtgaaggaaacggtgtggactgttgatccggatgcgctggtgaccatcgtgggcggtttccgccgtggcaaacctcagggccacgacgttgacctgctgatcacgattccgggccgtcctacggatccggagctgctccacaacgtggttgatctgctcaagaagcaaggtctgctgctgtacggggacatccgtgagcgtacgttcgtggaggggcaactgccaaatcctaaacctgaccagctggacaatcatcagaagtgcttcgccattctcaagctgtaccgcccgaaggtggataacagtgcggttgggacgtcgaagaaagtcgacatggctgaggttaaggattggaaagcggttcgtgtggatctggtggtcgctccagatgagcagttcgcctatgcgaaactcggttggacgggcagcggcatgtttcgtcgcgatactcgtcgctacgcggaggaagagcgcgacatgctgctcgacaaccatggtctctacgacctgaaaaagggcatttttctgagtgcggacagcgaagaagagattttcggtcatctggacctggattatctggagccgtgggaacgcaacgcg

SEQ ID NO: 6502 - protein, 394 aa, synthetic construct
  REGION 1..394: note = Variant of terminal deoxynucleotidyl transferase
MHHHHHHGGSGHPEGNTPEKEVPSVIARHVSPYACQRKTTLNNYNKKITDALEIMAENYKFKENLQARLEARRAASVLKSLPFEVTSMKDIQGLPCITDDVRPVIEEIIEVGESSRVKEILNDERYKAFKQFTSVFGVGVKTAEKWYRTGLRTLEEVKASKFLKLNKMQKAGFLYYEDLASGVTKEEKDAVLDIVKETVWTVDPDALVTIVGGFRRGKPQGHDVDLLITIPGRPTDPELLHNVVDLLKKQGLLLYGDIRERTFVEGQLPNPKPDQLDNHQKCFAILKLYRPKVDNSAVGTSKKVDMAEVKDWKAVRVDLVVAPDEQFAYAKLGWTGSGMFRRDTRRYAEEERDMLLDNHGLYDLKKGIFLSADSEEEIFGHLDLDYLEPWERNA

SEQ ID NO: 6503 - DNA, 1182 bp, synthetic construct
  misc_feature 1..1182: note = Variant of terminal deoxynucleotidyl transferase
  source 1..1182: mol_type = other DNA
atgcaccatcatcaccatcacgggggctccggccatccggaaggtaataccccggagaaggaggtgccgagcgttatcgcccgtcatgttagtccgtacgcgtgccagcgcaagaccacgctgaataactacaacaaaaagatcaccgacgcgctggagatcatggccgagaactacaagtttaaagagaacctgcaggcgcgcctggaggcccgtcgcgccgcgagtgtcctgaaaagcctgccgttcgaggttaccagcatgaaagacatccaaggtctgccgtgcattaccgacgacgtacgtcctgtgatcgaagagatcatcgaagtaggcgagagcagccgtgttaaagaaatcctcaatgacgagcgctacaaggcctttaagcagttcaccagcgtgttcggtgtgggcgtcaagaccgcggaaaagtggtaccgtatgggcctccgtacgctggaagaagtaaaggccagtaagttcctgaagctgaacaagatgcagaaggcgggcttcctgtactacgaggatctggcgagcggtgttacgaaagaagaaaaagatgccgttctggatatcgtgaaggaaacggtgtggactgttgatccggatgcgctggtgaccatcgtgggcggtttccgccgtggcaaacctcagggccacgacgttgacctgctgatcacgattccgggccgtcctacggatccggagctgctccactcggtggttgatctgctcaagaagcaaggtctgctgctgtacggggacatccgtgagcgtacgttcgtggaggggcaactgccaaatcctaaacctgaccagctggacaatcatcagaagtgcttcgccattctcaagctgtaccgcccgaaggtggataacagtgcggttgggacgtcgaagaaagtcgacatggctgaggttaaggattggaaagcggttcgtgtggatctggtggtcgctccagatgagcagttcgcctatgcgaaactcggttggacgggcagcggcatgtttcgtcgcgatactcgtcgctacgcggaggaagagcgcgacatgctgctcgacaaccatggtctctacgacctgaaaaagggcatttttctgagtgcggacagcgaagaagagattttcggtcatctggacctggattatctggagccgtgggaacgcaacgcg

SEQ ID NO: 6504 - protein, 394 aa, synthetic construct
  REGION 1..394: note = Variant of terminal deoxynucleotidyl transferase
MHHHHHHGGSGHPEGNTPEKEVPSVIARHVSPYACQRKTTLNNYNKKITDALEIMAENYKFKENLQARLEARRAASVLKSLPFEVTSMKDIQGLPCITDDVRPVIEEIIEVGESSRVKEILNDERYKAFKQFTSVFGVGVKTAEKWYRMGLRTLEEVKASKFLKLNKMQKAGFLYYEDLASGVTKEEKDAVLDIVKETVWTVDPDALVTIVGGFRRGKPQGHDVDLLITIPGRPTDPELLHSVVDLLKKQGLLLYGDIRERTFVEGQLPNPKPDQLDNHQKCFAILKLYRPKVDNSAVGTSKKVDMAEVKDWKAVRVDLVVAPDEQFAYAKLGWTGSGMFRRDTRRYAEEERDMLLDNHGLYDLKKGIFLSADSEEEIFGHLDLDYLEPWERNA

SEQ ID NO: 6505 - DNA, 1182 bp, synthetic construct
  misc_feature 1..1182: note = Variant of terminal deoxynucleotidyl transferase
  source 1..1182: mol_type = other DNA
atgcaccatcatcaccatcacgggggctccggccatccggaaggtaataccccggagaaggaggtgccgagcgttatcgcccgtcatgttagtccgtacgcgtgccagcgcaagaccacgctgaataactacaacaaaaagatcaccgacgcgctggagatcatggccgagaactacaagtttaaagagaacctgcaggcgcgcctggaggcccgtcgcgccgcgagtgtcctgaaaagcctgccgttcgaggttaccagcatgaaagacatccaaggtctgccgtgcattaccgacgacgtacgtcctgtgatcgaagagatcatcgaagtaggcgagagcagccgtgttaaagaaatcctcaatgacgagcgctacaaggcctttaagcagttcaccagcgtgttcggtgtgggcgtcaagaccgcggaaaagtggtaccgtatgggcctccgtacgctggaagaagtaaaggccagtaagttcctgaagctgaacaagatgcagaaggcgggcttcctgtactacgaggatctggcgagcggtgttacgaaagaagaaaaagatgccgttctggatatcgtgaaggaaacggtgtggactgttgatccggatgcgctggtgaccatcgtgggcggtttccgccgtggcaaacctcagggccacgacgttgacctgctgatcacgattccgggccgtcctacggatccggagctgctccacaacgtggttgatctgctcaagaagcaaggtctgctgctgtacggggacatccgtgagcgtacgttcgtggaggggcaactgccaaatcctaaacctgaccagctggacaatcatcagaagtgcttcgccattctcaagctgtaccgcccgaaggtggataacagtgcggttgggacgtcgaagaaagtcgacatggctgaggttaaggattggaaagcggttcgtgtggatctggtggtcgctccaagtgagcagttcgcctatgcgaaactcggttggacgggcagcggcatgtttcgtcgcgatactcgtcgctacgcggaggaagagcgcgacatgctgctcgacaaccatggtctctacgacctgaaaaagggcatttttctgagtgcggacagcgaagaagagattttcggtcatctggacctggattatctggagccgtgggaacgcaacgcg

SEQ ID NO: 6506 - protein, 394 aa, synthetic construct
  REGION 1..394: note = Variant of terminal deoxynucleotidyl transferase
MHHHHHHGGSGHPEGNTPEKEVPSVIARHVSPYACQRKTTLNNYNKKITDALEIMAENYKFKENLQARLEARRAASVLKSLPFEVTSMKDIQGLPCITDDVRPVIEEIIEVGESSRVKEILNDERYKAFKQFTSVFGVGVKTAEKWYRMGLRTLEEVKASKFLKLNKMQKAGFLYYEDLASGVTKEEKDAVLDIVKETVWTVDPDALVTIVGGFRRGKPQGHDVDLLITIPGRPTDPELLHNVVDLLKKQGLLLYGDIRERTFVEGQLPNPKPDQLDNHQKCFAILKLYRPKVDNSAVGTSKKVDMAEVKDWKAVRVDLVVAPSEQFAYAKLGWTGSGMFRRDTRRYAEEERDMLLDNHGLYDLKKGIFLSADSEEEIFGHLDLDYLEPWERNA

SEQ ID NO: 6507 - DNA, 1182 bp, synthetic construct
  misc_feature 1..1182: note = Variant of terminal deoxynucleotidyl transferase
  source 1..1182: mol_type = other DNA
atgcaccatcatcaccatcacgggggctccggccatccggaaggtaataccccggagaaggaggtgccgagcgttatcgcccgtcatgttagtccgtacgcgtgccagcgcaagaccacgctgaataactacaacaaaaagatcaccgacgcgctggagatcatggccgagaactacaagtttaaagagaacctgcaggcgcgcctggaggcccgtcgcgccgcgagtgtcctgaaaagcctgccgttcgaggttaccagcatgaaagacatccaaggtctgccgtgcattaccgacgacgtacgtcctgtgatcgaagagatcatcgaagtaggcgagagcagccgtgttaaagaaatcctcaatgacgagcgctacaaggcctttaagcagttcacccaggtgttcggtgtgggcgtcaagaccgcggaaaagtggtaccgtatgggcctccgtacgctggaagaagtaaaggccagtaagttcctgaagctgaacaagatgcagaaggcgggcttcctgtactacgaggatctggcgagcggtgttacgaaagaagaaaaagatgccgttctggatatcgtgaaggaaacggtgtggactgttgatccggatgcgctggtgaccatcgtgggcggtttccgccgtggcaaacctcagggccacgacgttgacctgctgatcacgattccgggccgtcctacggatccggagctgctccacaacgtggttgatctgctcaagaagcaaggtctgctgctgtacggggacatccgtgagcgtacgttcgtggaggggcaactgccaaatcctaaacctgaccagctggacaatcatcagaagtgcttcgccattctcaagctgtaccgcccgaaggtggataacagtgcggttgggacgtcgaagaaagtcgacatggctgaggttaaggattggaaagcggttcgtgtggatctggtggtcgctccagatgagcagttcgcctatgcgaaactcggttggacgggcagcggcatgtttcgtcgcgatactcgtcgctacgcggaggaagagcgcgacatgctgctcgacaaccatggtctctacgacctgaaaaagggcatttttctgagtgcggacagcgaagaagagattttcggtcatctggacctggattatctggagccgtgggaacgcaacgcg

SEQ ID NO: 6508 - protein, 394 aa, synthetic construct
  REGION 1..394: note = Variant of terminal deoxynucleotidyl transferase
MHHHHHHGGSGHPEGNTPEKEVPSVIARHVSPYACQRKTTLNNYNKKITDALEIMAENYKFKENLQARLEARRAASVLKSLPFEVTSMKDIQGLPCITDDVRPVIEEIIEVGESSRVKEILNDERYKAFKQFTQVFGVGVKTAEKWYRMGLRTLEEVKASKFLKLNKMQKAGFLYYEDLASGVTKEEKDAVLDIVKETVWTVDPDALVTIVGGFRRGKPQGHDVDLLITIPGRPTDPELLHNVVDLLKKQGLLLYGDIRERTFVEGQLPNPKPDQLDNHQKCFAILKLYRPKVDNSAVGTSKKVDMAEVKDWKAVRVDLVVAPDEQFAYAKLGWTGSGMFRRDTRRYAEEERDMLLDNHGLYDLKKGIFLSADSEEEIFGHLDLDYLEPWERNA

SEQ ID NO: 6509 - DNA, 1182 bp, synthetic construct
  misc_feature 1..1182: note = Variant of terminal deoxynucleotidyl transferase
  source 1..1182: mol_type = other DNA
atgcaccatcatcaccatcacgggggctccggccatccggaaggtaataccccggagaaggaggtgccgagcgttatcgcccgtcatgttagtccgtacgcgtgccagcgcaagaccacgctgaataactacaacaaaaagatcaccgacgcgctggagatcatggccgagaactacaagtttaaagagaacctgcaggcgcgcctggaggcccgtcgcgccgcgagtgtcctgaaaagcctgccgttcgaggttaccagcatgaaagacatccaaggtctgccgtgcattaccgacgacgtacgtcctgtgatcgaagagatcatcgaagtaggcgagagcagccgtgttaaagaaatcctcaatgacgagcgctacaaggcctttaagcagttcaccagcgtgttcggtgtgggcgtcaagaccgcggaaaagtggtaccgtatgggcctccgtacgctggaagaagtatctgccagtaagttcctgaagctgaacaagatgcagaaggcgggcttcctgtactacgaggatctggcgagcggtgttacgaaagaagaaaaagatgccgttctggatatcgtgaaggaaacggtgtggactgttgatccggatgcgctggtgaccatcgtgggcggtttccgccgtggcaaacctcagggccacgacgttgacctgctgatcacgattccgggccgtcctacggatccggagctgctccacaacgtggttgatctgctcaagaagcaaggtctgctgctgtacggggacatccgtgagcgtacgttcgtggaggggcaactgccaaatcctaaacctgaccagctggacaatcatcagaagtgcttcgccattctcaagctgtaccgcccgaaggtggataacagtgcggttgggacgtcgaagaaagtcgacatggctgaggttaaggattggaaagcggttcgtgtggatctggtggtcgctccagatgagcagttcgcctatgcgaaactcggttggacgggcagcggcatgtttcgtcgcgatactcgtcgctacgcggaggaagagcgcgacatgctgctcgacaaccatggtctctacgacctgaaaaagggcatttttctgagtgcggacagcgaagaagagattttcggtcatctggacctggattatctggagccgtgggaacgcaacgcg

SEQ ID NO: 6510 - protein, 394 aa, synthetic construct
  REGION 1..394: note = Variant of terminal deoxynucleotidyl transferase
MHHHHHHGGSGHPEGNTPEKEVPSVIARHVSPYACQRKTTLNNYNKKITDALEIMAENYKFKENLQARLEARRAASVLKSLPFEVTSMKDIQGLPCITDDVRPVIEEIIEVGESSRVKEILNDERYKAFKQFTSVFGVGVKTAEKWYRMGLRTLEEVSASKFLKLNKMQKAGFLYYEDLASGVTKEEKDAVLDIVKETVWTVDPDALVTIVGGFRRGKPQGHDVDLLITIPGRPTDPELLHNVVDLLKKQGLLLYGDIRERTFVEGQLPNPKPDQLDNHQKCFAILKLYRPKVDNSAVGTSKKVDMAEVKDWKAVRVDLVVAPDEQFAYAKLGWTGSGMFRRDTRRYAEEERDMLLDNHGLYDLKKGIFLSADSEEEIFGHLDLDYLEPWERNA

SEQ ID NO: 6511 - DNA, 1182 bp, synthetic construct
  misc_feature 1..1182: note = Variant of terminal deoxynucleotidyl transferase
  source 1..1182: mol_type = other DNA
atgcaccatcatcaccatcacgggggctccggccatccggaaggtaataccccggagaaggaggtgccgagcgttatcgcccgtcatgttagtccgtacgcgtgccagcgcaagaccacgctgaataactacaacaaaaagatcaccgacgcgctggagatcatggccgagaactacaagtttaaagagaacctgcaggcgcgcctggaggcccgtcgcgccgcgagtgtcctgaaaagcctgccgttcgaggttaccagcatgaaagacatccaaggtctgccgtgcattaccgacgacgtacgtcctgtgatcgaagagatcatcgaagtaggcgagagcagccgtgttaaagaaatcctcaatgacgagcgctacaaggcctttaagcagttcaccagcgtgttcggtgtgggcgtcaagaccgcggaactgtggtaccgtatgggcctccgtacgctggaagaagtaaaggccagtaagttcctgaagctgaacaagatgcagaaggcgggcttcctgtactacgaggatctggcgagcggtgttacgaaagaagaaaaagatgccgttctggatatcgtgaaggaaacggtgtggactgttgatccggatgcgctggtgaccatcgtgggcggtttccgccgtggcaaacctcagggccacgacgttgacctgctgatcacgattccgggccgtcctacggatccggagctgctccacaacgtggttgatctgctcaagaagcaaggtctgctgctgtacggggacatccgtgagcgtacgttcgtggaggggcaactgccaaatcctaaacctgaccagctggacaatcatcagaagtgcttcgccattctcaagctgtaccgcccgaaggtggataacagtgcggttgggacgtcgaagaaagtcgacatggctgaggttaaggattggaaagcggttcgtgtggatctggtggtcgctccagatgagcagttcgcctatgcgaaactcggttggacgggcagcggcatgtttcgtcgcgatactcgtcgctacgcggaggaagagcgcgacatgctgctcgacaaccatggtctctacgacctgaaaaagggcatttttctgagtgcggacagcgaagaagagattttcggtcatctggacctggattatctggagccgtgggaacgcaacgcg

SEQ ID NO: 6512 - protein, 394 aa, synthetic construct
  REGION 1..394: note = Variant of terminal deoxynucleotidyl transferase
MHHHHHHGGSGHPEGNTPEKEVPSVIARHVSPYACQRKTTLNNYNKKITDALEIMAENYKFKENLQARLEARRAASVLKSLPFEVTSMKDIQGLPCITDDVRPVIEEIIEVGESSRVKEILNDERYKAFKQFTSVFGVGVKTAELWYRMGLRTLEEVKASKFLKLNKMQKAGFLYYEDLASGVTKEEKDAVLDIVKETVWTVDPDALVTIVGGFRRGKPQGHDVDLLITIPGRPTDPELLHNVVDLLKKQGLLLYGDIRERTFVEGQLPNPKPDQLDNHQKCFAILKLYRPKVDNSAVGTSKKVDMAEVKDWKAVRVDLVVAPDEQFAYAKLGWTGSGMFRRDTRRYAEEERDMLLDNHGLYDLKKGIFLSADSEEEIFGHLDLDYLEPWERNA

SEQ ID NO: 6513 - DNA, 1182 bp, synthetic construct
  misc_feature 1..1182: note = Variant of terminal deoxynucleotidyl transferase
  source 1..1182: mol_type = other DNA
atgcaccatcatcaccatcacgggggctccggccatccggaaggtaataccccggagaaggaggtgccgagcgttatcgcccgtcatgttagtccgtacgcgtgccagcgcaagaccacgctgaataactacaacaaaaagatcaccgacgcgctggagatcatggccgagaactacaagtttaaagagaacctgcaggcgcgcctggaggcccgtcgcgccgcgagtgtcctgaaaagcctgccgttcgaggttaccagcatgaaagacatccaaggtctgccgtgcattaccgacgacgtacgtcctgtgatcgaagagatcatcgaagtaggcgagagcagccgtgttaaagaaatcctcaatgacgagcgctacaaggcctttaagcagttcaccagcgtgttcggtgtgggcgtcaagaccgcggaaaagtggtaccgtatgggcctccgtacgctgaaggaagtaaaggccagtaagttcctgaagctgaacaagatgcagaaggcgggcttcctgtactacgaggatctggcgagcggtgttacgaaagaagaaaaagatgccgttctggatatcgtgaaggaaacggtgtggactgttgatccggatgcgctggtgaccatcgtgggcggtttccgccgtggcaaacctcagggccacgacgttgacctgctgatcacgattccgggccgtcctacggatccggagctgctccacaacgtggttgatctgctcaagaagcaaggtctgctgctgtacggggacatccgtgagcgtacgttcgtggaggggcaactgccaaatcctaaacctgaccagctggacaatcatcagaagtgcttcgccattctcaagctgtaccgcccgaaggtggataacagtgcggttgggacgtcgaagaaagtcgacatggctgaggttaaggattggaaagcggttcgtgtggatctggtggtcgctccagatgagcagttcgcctatgcgaaactcggttggacgggcagcggcatgtttcgtcgcgatactcgtcgctacgcggaggaagagcgcgacatgctgctcgacaaccatggtctctacgacctgaaaaagggcatttttctgagtgcggacagcgaagaagagattttcggtcatctggacctggattatctggagccgtgggaacgcaacgcg

SEQ ID NO: 6514 - protein, 394 aa, synthetic construct
  REGION 1..394: note = Variant of terminal deoxynucleotidyl transferase
MHHHHHHGGSGHPEGNTPEKEVPSVIARHVSPYACQRKTTLNNYNKKITDALEIMAENYKFKENLQARLEARRAASVLKSLPFEVTSMKDIQGLPCITDDVRPVIEEIIEVGESSRVKEILNDERYKAFKQFTSVFGVGVKTAEKWYRMGLRTLKEVKASKFLKLNKMQKAGFLYYEDLASGVTKEEKDAVLDIVKETVWTVDPDALVTIVGGFRRGKPQGHDVDLLITIPGRPTDPELLHNVVDLLKKQGLLLYGDIRERTFVEGQLPNPKPDQLDNHQKCFAILKLYRPKVDNSAVGTSKKVDMAEVKDWKAVRVDLVVAPDEQFAYAKLGWTGSGMFRRDTRRYAEEERDMLLDNHGLYDLKKGIFLSADSEEEIFGHLDLDYLEPWERNA

SEQ ID NO: 6515 - DNA, 1182 bp, synthetic construct
  misc_feature 1..1182: note = Variant of terminal deoxynucleotidyl transferase
  source 1..1182: mol_type = other DNA
atgcaccatcatcaccatcacgggggctccggccatccggaaggtaataccccggagaaggaggtgccgagcgttatcgcccgtcatgttagtccgtacgcgtgccagcgcaagaccacgctgaataactacaacaaaaagatcaccgacgcgctggagatcatggccgagaactacaagtttaaagagaacctgcaggcgcgcctggaggcccgtcgcgccgcgagtgtcctgaaaagcctgccgttcgaggttaccagcatgaaagacatccaaggtctgccgtgcattaccgacgacgtacgtcctgtgatcgaagagatcatcgaagtaggcgagagcagccgtgttaaagaaatcctcaatgacgagcgctacaaggcctttaagcagttcaccagcgtgttcggtgtgggcgtcaagaccgcggaaaagtggtaccgtatgggcctccgtacgctggaagaagtaaaggccagtaagttcctgaagctgaacaagatgcagaaggcgggcttcctgtactacgaggatctggcgagcggtgttacgaaagaagaaaaagatgccgttctggatatcgtgaaggaaacggtgtggactgttgatccggatgcgctggtgaccatcgtgggcggtttccgccgtggcaaacctcagggccacgacgttgacctgctgatcacgattccgggccgtcctacggatccggagctgctccacaacgtggttgatctgctcaagaagcaaggtctgctgctgtacggggacatccgtgagcgtacgttcgtggaggggcaactgccacagcctaaacctgaccagctggacaatcatcagaagtgcttcgccattctcaagctgtaccgcccgaaggtggataacagtgcggttgggacgtcgaagaaagtcgacatggctgaggttaaggattggaaagcggttcgtgtggatctggtggtcgctccagatgagcagttcgcctatgcgaaactcggttggacgggcagcggcatgtttcgtcgcgatactcgtcgctacgcggaggaagagcgcgacatgctgctcgacaaccatggtctctacgacctgaaaaagggcatttttctgagtgcggacagcgaagaagagattttcggtcatctggacctggattatctggagccgtgggaacgcaacgcg

SEQ ID NO: 6516 - protein, 394 aa, synthetic construct
  REGION 1..394: note = Variant of terminal deoxynucleotidyl transferase
MHHHHHHGGSGHPEGNTPEKEVPSVIARHVSPYACQRKTTLNNYNKKITDALEIMAENYKFKENLQARLEARRAASVLKSLPFEVTSMKDIQGLPCITDDVRPVIEEIIEVGESSRVKEILNDERYKAFKQFTSVFGVGVKTAEKWYRMGLRTLEEVKASKFLKLNKMQKAGFLYYEDLASGVTKEEKDAVLDIVKETVWTVDPDALVTIVGGFRRGKPQGHDVDLLITIPGRPTDPELLHNVVDLLKKQGLLLYGDIRERTFVEGQLPQPKPDQLDNHQKCFAILKLYRPKVDNSAVGTSKKVDMAEVKDWKAVRVDLVVAPDEQFAYAKLGWTGSGMFRRDTRRYAEEERDMLLDNHGLYDLKKGIFLSADSEEEIFGHLDLDYLEPWERNA

SEQ ID NO: 6517 - DNA, 1182 bp, synthetic construct
  misc_feature 1..1182: note = Variant of terminal deoxynucleotidyl transferase
  source 1..1182: mol_type = other DNA
atgcaccatcatcaccatcacgggggctccggccatccggaaggtaataccccggagaaggaggtgccgagcgttatcgcccgtcatgttagtccgtacgcgtgccagcgcaagaccacgctgaataactacaacaaaaagatcaccgacgcgctggagatcatggccgagaactacaagtttaaagagaacctgcaggcgcgcctggaggcccgtcgcaccgcgagtgtcctgaaaagcctgccgttcgaggttaccagcatgaaagacatccaaggtctgccgtgcattaccgacgacgtacgtcctgtgatcgaagagatcatcgaagtaggcgagagcagccgtgttaaagaaatcctcaatgacgagcgctacaaggcctttaagcagttcaccagcgtgttcggtgtgggcgtcaagaccgcggaaaagtggtaccgtatgggcctccgtacgctggaagaagtaaaggccagtaagttcctgaagctgaacaagatgcagaaggcgggcttcctgtactacgaggatctggcgagcggtgttacgaaagaagaaaaagatgccgttctggatatcgtgaaggaaacggtgtggactgttgatccggatgcgctggtgaccatcgtgggcggtttccgccgtggcaaacctcagggccacgacgttgacctgctgatcacgattccgggccgtcctacggatccggagctgctccacaacgtggttgatctgctcaagaagcaaggtctgctgctgtacggggacatccgtgagcgtacgttcgtggaggggcaactgccaaatcctggtcctgaccagctggacaatcatcagaagtgcttcgccattctcaagctgtaccgcccgaaggtggataacagtgcggttgggacgtcgaagaaagtcgacatggctgaggttaaggattggaaagcggttcgtgtggatctggtggtcgctccagatgagcagttcgcctatgcgaaactcggttggacgggcagcggcatgtttcgtcgcgatactcgtcgctacgcggaggaagagcgcgacatgctgctcgacaaccatggtctctacgacctgaaaaagggcatttttctgagtgcggacagcgaagaagagattttcggtcatctggacctggattatctggagccgtgggaacgcaacgcg

SEQ ID NO: 6518 - protein, 394 aa, synthetic construct
  REGION 1..394: note = Variant of terminal deoxynucleotidyl transferase
MHHHHHHGGSGHPEGNTPEKEVPSVIARHVSPYACQRKTTLNNYNKKITDALEIMAENYKFKENLQARLEARRTASVLKSLPFEVTSMKDIQGLPCITDDVRPVIEEIIEVGESSRVKEILNDERYKAFKQFTSVFGVGVKTAEKWYRMGLRTLEEVKASKFLKLNKMQKAGFLYYEDLASGVTKEEKDAVLDIVKETVWTVDPDALVTIVGGFRRGKPQGHDVDLLITIPGRPTDPELLHNVVDLLKKQGLLLYGDIRERTFVEGQLPNPGPDQLDNHQKCFAILKLYRPKVDNSAVGTSKKVDMAEVKDWKAVRVDLVVAPDEQFAYAKLGWTGSGMFRRDTRRYAEEERDMLLDNHGLYDLKKGIFLSADSEEEIFGHLDLDYLEPWERNA

SEQ ID NO: 6519 - DNA, 1182 bp, synthetic construct
  misc_feature 1..1182: note = Variant of terminal deoxynucleotidyl transferase
  source 1..1182: mol_type = other DNA
atgcaccatcatcaccatcacgggggctccggccatccggaaggtaataccccggagaaggaggtgccgagcgttatcgcccgtcatgttagtccgtacgcgtgccagcgcaagaccacgctgaataactacaacaaaaagatcaccgacgcgctggagatcatggccgagaactacaagtttaaagagaacctgcaggcgcgcctggaggcccgtcgcgccgcgagtgtcctgaaaagcctgccgttcgaggttaccagcatgaaagacatccaaggtctgccgtgcattaccgacgacgtacgtcctgtgatcgaagagatcatcgaagtaggcgagagcagccgtgttaaagaaatcctcaatgacgagcgctacaaggcctttaagcagttcaccagcgtgttcggtgtgggcgtcaagaccgcggaaaagtggtaccgtatgggcctccgtacgctggaagaagtaaaggccagtaagttcctgaagctgaacaagatgcagaaggcgggcttcctgtactacgaggatctggcgagcggtgttacgaaagaagaaaaagatgccgttctggatatcgtgaaggaaacggtgtggactgttgatccggatgcgctggtgaccatcgtgggcggtttccgccgtggcaaacctcagggccacgacgttgacctgctgatcacgattccgggccgtcctacggatccggagctgctccacaacgtggttgatctgctcaagaagcaaggtctgctgctgtacggggacatccgtgagcgtgagttcgtggaggggcaactgccaaatcctaaacctgaccagctggacaatcatcagaagtgcttcgccattctcaagctgtaccgcccgaaggtggataacagtgcggttgggacgtcgaagaaagtcgacatggctgaggttaaggattggaaagcggttcgtgtggatctggtggtcgctccagatgagcagttcgcctatgcgaaactcggttggacgggcagcggcatgtttcgtcgcgatactcgtcgctacgcggaggaagagcgcgacatgctgctcgacaaccatggtctctacgacctgaaaaagggcatttttctgagtgcggacagcgaagaagagattttcggtcatctggacctggattatctggagccgtgggaacgcaacgcg

SEQ ID NO: 6520 - protein, 394 aa, synthetic construct
  REGION 1..394: note = Variant of terminal deoxynucleotidyl transferase
MHHHHHHGGSGHPEGNTPEKEVPSVIARHVSPYACQRKTTLNNYNKKITDALEIMAENYKFKENLQARLEARRAASVLKSLPFEVTSMKDIQGLPCITDDVRPVIEEIIEVGESSRVKEILNDERYKAFKQFTSVFGVGVKTAEKWYRMGLRTLEEVKASKFLKLNKMQKAGFLYYEDLASGVTKEEKDAVLDIVKETVWTVDPDALVTIVGGFRRGKPQGHDVDLLITIPGRPTDPELLHNVVDLLKKQGLLLYGDIREREFVEGQLPNPKPDQLDNHQKCFAILKLYRPKVDNSAVGTSKKVDMAEVKDWKAVRVDLVVAPDEQFAYAKLGWTGSGMFRRDTRRYAEEERDMLLDNHGLYDLKKGIFLSADSEEEIFGHLDLDYLEPWERNA

SEQ ID NO: 6521 - DNA, 1182 bp, synthetic construct
  misc_feature 1..1182: note = Variant of terminal deoxynucleotidyl transferase
  source 1..1182: mol_type = other DNA
atgcaccatcatcaccatcacgggggctccggccatccggaaggtaataccccggagaaggaggtgccgagcgttatcgcccgtcatgttagtccgtacgcgtgccagcgcaagaccacgctgaataactacaacaaaaagatcaccgacgcgctggagatcatggccgagaactacaagtttaaagagaacctgcaggcgcgcctggaggcccgtcgcgccgcgagtgtcctgaaaagcctgccgttcgaggttaccagcatgaaagacatccaaggtctgccgtgcattaccgacgacgtacgtcctgtgatcgaagagatcatcgaagtaggcgagagcagccgtgttaaagaaatcctcaatgacgagcgctacaaggcctttaagcagttcaccagcgtgttcggtgtgggcgtcaagaccgcggaaaagtggtaccgtatgggcctccgtacgctggaagaagtaaaggccagtaagttcctgaagctgaacaagatgcagaaggcgggcttcctgtactacgaggatctggcgagcggtgttacgaaagaagaaaaagatgccgttctggatatcgtgaaggaaacggtgtggactgttgatccggatgcgctggtgaccatcgtgggcggtttccgccgtggcaaacctcagggccacgacgttgacctgctgatcacgattccgggccgtcctacggatccggagctgctccacaacgtggttgatctgctcaagaagcaaggtctgctgctgtacggggacatccgtgagcgtacgttcgtggaggggcaactgccaaatcctaaacctgaccagctggacaatcatcagaagtgcttcgccattctcaagctgtaccgcccgaaggtggataacagtgcggttgggacgtcgaagaaagtcgacatggctgaggttaaggattggaaagcggttcgtgtggatctggtggtcgctccagatgagcagttcgcctatgcgaaactcggttggacgggcagcggcatgtttcgtcgcgatttgcgtcgctacgcggaggaagagcgcgacatgctgctcgacaaccatggtctctacgacctgaaaaagggcatttttctgagtgcggacagcgaagaagagattttcggtcatctggacctggattatctggagccgtgggaacgcaacgcg

SEQ ID NO: 6522 - protein, 394 aa, synthetic construct
  REGION 1..394: note = Variant of terminal deoxynucleotidyl transferase
MHHHHHHGGSGHPEGNTPEKEVPSVIARHVSPYACQRKTTLNNYNKKITDALEIMAENYKFKENLQARLEARRAASVLKSLPFEVTSMKDIQGLPCITDDVRPVIEEIIEVGESSRVKEILNDERYKAFKQFTSVFGVGVKTAEKWYRMGLRTLEEVKASKFLKLNKMQKAGFLYYEDLASGVTKEEKDAVLDIVKETVWTVDPDALVTIVGGFRRGKPQGHDVDLLITIPGRPTDPELLHNVVDLLKKQGLLLYGDIRERTFVEGQLPNPKPDQLDNHQKCFAILKLYRPKVDNSAVGTSKKVDMAEVKDWKAVRVDLVVAPDEQFAYAKLGWTGSGMFRRDLRRYAEEERDMLLDNHGLYDLKKGIFLSADSEEEIFGHLDLDYLEPWERNA

SEQ ID NO: 6523 - DNA, 1182 bp, synthetic construct
  misc_feature 1..1182: note = Variant of terminal deoxynucleotidyl transferase
  source 1..1182: mol_type = other DNA
atgcaccatcatcaccatcacgggggctccggccatccggaaggtaataccccggagaaggaggtgccgagcgttatcgcccgtcatgttagtccgtacgcgtgccagcgcaagaccacgctgaataactacaacaaaaagatcaccgacgcgctggagatcatggccgagaactacaagtggaaagagaacctgcaggcgcgcctggaggcccgtcgcgccgcgagtgtcctgaaaagcctgccgttcgaggttaccagcatgaaagacatccaaggtctgccgtgcattaccgacgacgtacgtcctgtgatcgaagagatcatcgaagtaggcgagagcagccgtgttaaagaaatcctcaatgacgagcgctacaaggcctttaagcagttcaccagcgtgttcggtgtgggcgtcaagaccgcggaaaagtggtaccgtatgggcctccgtacgctggaagaagtaaaggccagtaagttcctgaagctgaacaagatgcagaaggcgggcttcctgtactacgaggatctggcgagcggtgttacgaaagaagaaaaagatgccgttctggatatcgtgaaggaaacggtgtggactgttgatccggatgcgctggtgaccatcgtgggcggtttccgccgtggcaaacctcagggccacgacgttgacctgctgatcacgattccgggccgtcctacggatccggagctgctccacaacgtggttgatctgctcaagaagcaaggtctgctgctgtacggggacatccgtgagcgtacgttcgtggaggggcaactgccaaatcctaaacctgaccagctggacaatcatcagaagtgcttcgccattctcaagctgtaccgcccgaaggtggataacagtgcggttgggacgtcgaagaaagtcgacatggctgaggttaaggattggaaagcggttcgtgtggatctggtggtcgctccagatgagcagttcgcctatgcgaaactcggttggacgggcagcggcatgtttcgtcgcgatactcgtcgctacgcggaggaagagcgcgacatgctgctcgacaaccatggtctctacgacctgaaaaagggcatttttctgagtgcggacagcgaagaagagattttcggtcatctggacctggattatctggagccgtgggaacgcaacgcg

SEQ ID NO: 6524 - protein, 394 aa, synthetic construct
  REGION 1..394: note = Variant of terminal deoxynucleotidyl transferase
MHHHHHHGGSGHPEGNTPEKEVPSVIARHVSPYACQRKTTLNNYNKKITDALEIMAENYKWKENLQARLEARRAASVLKSLPFEVTSMKDIQGLPCITDDVRPVIEEIIEVGESSRVKEILNDERYKAFKQFTSVFGVGVKTAEKWYRMGLRTLEEVKASKFLKLNKMQKAGFLYYEDLASGVTKEEKDAVLDIVKETVWTVDPDALVTIVGGFRRGKPQGHDVDLLITIPGRPTDPELLHNVVDLLKKQGLLLYGDIRERTFVEGQLPNPKPDQLDNHQKCFAILKLYRPKVDNSAVGTSKKVDMAEVKDWKAVRVDLVVAPDEQFAYAKLGWTGSGMFRRDTRRYAEEERDMLLDNHGLYDLKKGIFLSADSEEEIFGHLDLDYLEPWERNA

SEQ ID NO: 6525 - DNA, 1182 bp, synthetic construct
  misc_feature 1..1182: note = Variant of terminal deoxynucleotidyl transferase
  source 1..1182: mol_type = other DNA
atgcaccatcatcaccatcacgggggctccggccatccggaaggtaataccccggagaaggaggtgccgagcgttatcgcccgtcatgttagtccgtacgcgtgccagcgcaagaccacgctgaataactacaacaaaaagatcaccgacgcgctggagatcatggccgagaactacaagtttaaagagaacctgcaggcgcgcctggaggcccgtcgcgccgcgagtgtcctgaaaagcctgccgttcgaggttaccagcatgaaagacatccaaggtctgccgtgcattaccgacgacgtacgtcctgtgatcgaagagatcatcgaagtaggcgagagcagccgtgttaaagaaatcctcaatgacgagcgctacaaggcctttaagcagttcacccttgtgttcggtgtgggcgtcaagaccgcggaaaagtggtaccgtatgggcctccgtacgctggaagaagtaaaggccagtaagttcctgaagctgaacaagatgcagaaggcgggcttcctgtactacgaggatctggcgagcggtgttacgaaagaagaaaaagatgccgttctggatatcgtgaaggaaacggtgtggactgttgatccggatgcgctggtgaccatcgtgggcggtttccgccgtggcaaacctcagggccacgacgttgacctgctgatcacgattccgggccgtcctacggatccggagctgctccacaacgtggttgatctgctcaagaagcaaggtctgctgctgtacggggacatccgtgagcgtacgttcgtggaggggcaactgccaaatcctaaacctgaccagctggacaatcatcagaagtgcttcgccattctcaagctgtaccgcccgaaggtggataacagtgcggttgggacgtcgaagaaagtcgacatggctgaggttaaggattggaaagcggttcgtgtggatctggtggtcgctccagatgagcagttcgcctatgcgaaactcggttggacgggcagcggcatgtttcgtcgcgatactcgtcgctacgcggaggaagagcgcgacatgctgctcgacaaccatggtctctacgacctgaaaaagggcatttttctgagtgcggacagcgaagaagagattttcggtcatctggacctggattatctggagccgtgggaacgcaacgcg

SEQ ID NO: 6526 - protein, 394 aa, synthetic construct
  REGION 1..394: note = Variant of terminal deoxynucleotidyl transferase
MHHHHHHGGSGHPEGNTPEKEVPSVIARHVSPYACQRKTTLNNYNKKITDALEIMAENYKFKENLQARLEARRAASVLKSLPFEVTSMKDIQGLPCITDDVRPVIEEIIEVGESSRVKEILNDERYKAFKQFTLVFGVGVKTAEKWYRMGLRTLEEVKASKFLKLNKMQKAGFLYYEDLASGVTKEEKDAVLDIVKETVWTVDPDALVTIVGGFRRGKPQGHDVDLLITIPGRPTDPELLHNVVDLLKKQGLLLYGDIRERTFVEGQLPNPKPDQLDNHQKCFAILKLYRPKVDNSAVGTSKKVDMAEVKDWKAVRVDLVVAPDEQFAYAKLGWTGSGMFRRDTRRYAEEERDMLLDNHGLYDLKKGIFLSADSEEEIFGHLDLDYLEPWERNA

SEQ ID NO: 6527 - DNA, 1182 bp, synthetic construct
  misc_feature 1..1182: note = Variant of terminal deoxynucleotidyl transferase
  source 1..1182: mol_type = other DNA
atgcaccatcatcaccatcacgggggctccggccatccggaaggtaataccccggagaaggaggtgccgagcgttatcgcccgtcatgttagtccgtacgcgtgccagcgcaagaccacgctgaataactacaacaaaaagatcaccgacgcgctggagatcatggccgagaactacaagtttaaagagaacctgcaggcgcgcctggaggcccgtcgcgccgcgagtgtcctgaaaagcctgccgttcgaggttaccagcatgaaagacatccaaggtctgccgtgcattaccgacgacgtacgtcctgtgatcgaagagatcatcgaagtaggcgagagcagccgtgttaaagaaatcctcaatgacgagcgctacaaggcctttaagcagttcaccagcgtgttcggtgtgggcgtcaagaccgcggaaaagtggtaccgtatgggcctccgtacgctggaagaagtaaaggccagtaagttcctgaagctgaacaagatgcagaaggcgggcttcctgtactacgaggatctggcgagcggtgttacgaaagaagaaaaagatgccgttctggatatcgtgaaggaaacggtgtggactgttgatccggatgcgctggtgaccatcgtgggcggtttccgccgtggcaaacctcagggccacgacgttgacctgctgatcacgattccgggccgtcctacggatccggagctgctccacaaagtgactgatctgctcaagaagcaaggtctgctgctgtacggggacatccgtgagcgtacgttcgtggaggggcaactgccaaatcctaaacctgaccagctggacaatcatcagaagtgcttcgccattctcaagctgtaccgcccgaaggtggataacagtgcggttgggacgtcgaagaaagtcgacatggctgaggttaaggattggaaagcggttcgtgtggatctggtggtcgctccagatgagcagttcgcctatgcgaaactcggttggacgggcagcggcatgtttcgtcgcgatactcgtcgctacgcggaggaagagcgcgacatgctgctcgacaaccatggtctctacgacctgaaaaagggcatttttctgagtgcggacagcgaagaagagattttcggtcatctggacctggattatctggagccgtgggaacgcaacgcg

SEQ ID NO: 6528 - protein, 394 aa, synthetic construct
  REGION 1..394: note = Variant of terminal deoxynucleotidyl transferase
MHHHHHHGGSGHPEGNTPEKEVPSVIARHVSPYACQRKTTLNNYNKKITDALEIMAENYKFKENLQARLEARRAASVLKSLPFEVTSMKDIQGLPCITDDVRPVIEEIIEVGESSRVKEILNDERYKAFKQFTSVFGVGVKTAEKWYRMGLRTLEEVKASKFLKLNKMQKAGFLYYEDLASGVTKEEKDAVLDIVKETVWTVDPDALVTIVGGFRRGKPQGHDVDLLITIPGRPTDPELLHKVTDLLKKQGLLLYGDIRERTFVEGQLPNPKPDQLDNHQKCFAILKLYRPKVDNSAVGTSKKVDMAEVKDWKAVRVDLVVAPDEQFAYAKLGWTGSGMFRRDTRRYAEEERDMLLDNHGLYDLKKGIFLSADSEEEIFGHLDLDYLEPWERNA

SEQ ID NO: 6529 - DNA, 1182 bp, synthetic construct
  misc_feature 1..1182: note = Variant of terminal deoxynucleotidyl transferase
  source 1..1182: mol_type = other DNA
atgcaccatcatcaccatcacgggggctccggccatccggaaggtaataccccggagaaggaggtgccgagcgttatcgcccgtcatgttagtccgtacgcgtgccagcgcaagaccacgctgaataactacaacaaaaagatcaccgacgcgctggaaatcatggccgagaactttaagtttaaagagaacctgcaggcgcgcctggaggcccgtcgcgccgcgagtgtcctgaaaagcctgccgttcgaggttaccagcatgaaagacatccaaggtctgccgtgcattaccgacgacgtacgtcctgtgatcgaagagatcatcgaagtaggcgagagcagccgtgttaaagaaatcctcaatgacgagcgctacaaggcctttaagcagttcaccagcgtgttcggtgtgggcgtcaagaccgcggaaaagtggtaccgtatgggcctccgtacgctggaagaagtaaaggccagtaagttcctgaagctgaacaagatgcagaaggcgggcttcctgtactacgaggatctggcgagcggtgttacgaaagaagaaaaagatgccgttctggatatcgtgaaggaaacggtgtggactgttgatccggatgcgctggtgaccatcgtgggcggtttccgccgtggcaaacctcagggccacgacgttgacctgctgatcacgattccgggccgtcctacggatccggagctgctccacaacgtggttgatctgctcaagaagcaaggtctgctgctgtacggggacatccgtgagcgtacgttcgtggaggggcaactgccaaatcctaaacctgaccagctggacaatcatcagaagtgcttcgccattctcaagctgtaccgcccgaaggtggataacagtgcggttgggacgtcgaagaaagtcgacatggctgaggttaaggattggaaagcggttcgtgtggatctggtggtcgctccagatgagcagttcgcctatgcgaaactcggttggacgggcagcggcatgtttcgtcgcgatactcgtcgctacgcggaggaagagcgcgacatgctgctcgacaaccatggtctctacgacctgaaaaagggcatttttctgagtgcggacagcgaagaagagattttcggtcatctggacctggattatctggagccgtgggaacgcaacgcg

SEQ ID NO: 6530 - protein, 394 aa, synthetic construct
  REGION 1..394: note = Variant of terminal deoxynucleotidyl transferase
MHHHHHHGGSGHPEGNTPEKEVPSVIARHVSPYACQRKTTLNNYNKKITDALEIMAENFKFKENLQARLEARRAASVLKSLPFEVTSMKDIQGLPCITDDVRPVIEEIIEVGESSRVKEILNDERYKAFKQFTSVFGVGVKTAEKWYRMGLRTLEEVKASKFLKLNKMQKAGFLYYEDLASGVTKEEKDAVLDIVKETVWTVDPDALVTIVGGFRRGKPQGHDVDLLITIPGRPTDPELLHNVVDLLKKQGLLLYGDIRERTFVEGQLPNPKPDQLDNHQKCFAILKLYRPKVDNSAVGTSKKVDMAEVKDWKAVRVDLVVAPDEQFAYAKLGWTGSGMFRRDTRRYAEEERDMLLDNHGLYDLKKGIFLSADSEEEIFGHLDLDYLEPWERNA

SEQ ID NO: 6531 - DNA, 1182 bp, synthetic construct
  misc_feature 1..1182: note = Variant of terminal deoxynucleotidyl transferase
  source 1..1182: mol_type = other DNA
atgcaccatcatcaccatcacgggggctccggccatccggaaggtaataccccggagaaggaggtgccgagcgttatcgcccgtcatgttagtccgtacgcgtgccagcgcaagaccacgctgaataactacaacaaaaagatcaccgacgcgctggagatcatggccgagaactacaagtttaaagagaacctgcaggcgcgcctggaggcccgtcgcgccgcgagtgtcctgaaaagcctgccgttcgaggttaccagcatgaaagacatccaaggtctgccgtgcattaccgacgacgtacgtcctgtgatcgaagagatcatcgaagtaggcgagagcagccgtgttaaagaaatcctcaatgacgagcgctacaaggcctttaagcagttcaccagcgtgttcggtgtgggcgtcaagaccgcggaaaagtggtaccgtatgggcctccgtacgctggaagaagtaaaggccagtaagttcctgaagctgaacaagatgcagaaggcgggcttcctgtactacgaggatctggcgagcggtgttacgaaagaagaaaaagatgccgttctggatatcgtgaaggaaacggtgtggactgttgatccggatgcgctggtgaccatcgtgggcggtttccgccgtggcaaaaggcagggccacgacgttgacctgctgatcacgattccgggccgtcctacggatccggagctgctccacaacgtggttgatctgctcaagaagcaaggtctgctgctgtacggggacatccgtgagcgtacgttcgtggaggggcaactgccaaatcctaaacctgaccagctggacaatcatcagaagtgcttcgccattctcaagctgtaccgcccgaaggtggataacagtgcggttgggacgtcgaagaaagtcgacatggctgaggttaaggattggaaagcggttcgtgtggatctggtggtcgctccagatgagcagttcgcctatgcgaaactcggttggacgggcagcggcatgtttcgtcgcgatactcgtcgctacgcggaggaagagcgcgacatgctgctcgacaaccatggtctctacgacctgaaaaagggcatttttctgagtgcggacagcgaagaagagattttcggtcatctggacctggattatctggagccgtgggaacgcaacgcg

SEQ ID NO: 6532 - protein, 394 aa, synthetic construct
  REGION 1..394: note = Variant of terminal deoxynucleotidyl transferase
MHHHHHHGGSGHPEGNTPEKEVPSVIARHVSPYACQRKTTLNNYNKKITDALEIMAENYKFKENLQARLEARRAASVLKSLPFEVTSMKDIQGLPCITDDVRPVIEEIIEVGESSRVKEILNDERYKAFKQFTSVFGVGVKTAEKWYRMGLRTLEEVKASKFLKLNKMQKAGFLYYEDLASGVTKEEKDAVLDIVKETVWTVDPDALVTIVGGFRRGKRQGHDVDLLITIPGRPTDPELLHNVVDLLKKQGLLLYGDIRERTFVEGQLPNPKPDQLDNHQKCFAILKLYRPKVDNSAVGTSKKVDMAEVKDWKAVRVDLVVAPDEQFAYAKLGWTGSGMFRRDTRRYAEEERDMLLDNHGLYDLKKGIFLSADSEEEIFGHLDLDYLEPWERNA

SEQ ID NO: 6533 - DNA, 1182 bp, synthetic construct
  misc_feature 1..1182: note = Variant of terminal deoxynucleotidyl transferase
  source 1..1182: mol_type = other DNA
atgcaccatcatcaccatcacgggggctccggccatccggaaggtaataccccggagaaggaggtgccgagcgttatcgcccgtcatgttagtccgtacgcgtgccagcgcaagaccacgctgaataactacaacaaaaagatcaccgacgcgctggagatcatggccgagaactacaagtttaaagagaacctgcaggcgcgcctggaggcccgtcgcgccgcgagtgtcctgaaaagcctgccgttcgaggttaccagcatgaaagacatccaaggtctgccgtgcattaccgacgacgtacgtcctgtgatcgaagagatcatcgaagtaggcgagagcagccgtgttaaagaaatcctcaatgacgagcgctacaaggcctttaagcagttcaccagcgtgttcggtgtgggcgtcaagaccgcggaaaagtggtaccgtatgggcctgcgtacgctggaagaagtaaaggcaagtaagttcctgaagctgaacaagatgcagaaggcgggcttcctgtactacgaggatctggcgagcggtgttacgaaagaagaaaaagatgccgttctggatatcgtgaaggaaacggtgtggactgttgatccggatgcgctggtggaaatcgtgggcggtttccgccgtcgcaaaccacagggccacgacgttgacctgctgatcacgattccgggccgtcctacggatccggagctgctccacaacgtggttgatctgctcaagaagcaaggtctgctgctgtacggggacatccgtgagcgtacgttcgtggaggggcaactgccaaatcctgcgccggaccagctggacggccatcagaagtgcttcgccattctcaagctgtaccgcccgaaggtggataacagtgcggttgggacgtcgaagaaagtcgacatggctgaggttaaggattggaaagcggttcgtgtggatctggtggtcgctccagatgagcagttcgcctatgcgaaactcggttggacgggcagcggcatgtttcgtcgcgatactcgtcgctacgcggaggaagagaaaaatatgctgctcgacaaccatggtctctacgacctgaaaaagggcatttttctgccggcggatagcgaagaagagattttcggtcatctggacctggattatctggagccgtggtatcgcaacgcg

SEQ ID NO: 6534 - protein, 394 aa, synthetic construct
  REGION 1..394: note = Variant of terminal deoxynucleotidyl transferase
MHHHHHHGGSGHPEGNTPEKEVPSVIARHVSPYACQRKTTLNNYNKKITDALEIMAENYKFKENLQARLEARRAASVLKSLPFEVTSMKDIQGLPCITDDVRPVIEEIIEVGESSRVKEILNDERYKAFKQFTSVFGVGVKTAEKWYRMGLRTLEEVKASKFLKLNKMQKAGFLYYEDLASGVTKEEKDAVLDIVKETVWTVDPDALVEIVGGFRRRKPQGHDVDLLITIPGRPTDPELLHNVVDLLKKQGLLLYGDIRERTFVEGQLPNPAPDQLDGHQKCFAILKLYRPKVDNSAVGTSKKVDMAEVKDWKAVRVDLVVAPDEQFAYAKLGWTGSGMFRRDTRRYAEEEKNMLLDNHGLYDLKKGIFLPADSEEEIFGHLDLDYLEPWYRNA

SEQ ID NO: 6535 - DNA, 1182 bp, synthetic construct
  misc_feature 1..1182: note = Variant of terminal deoxynucleotidyl transferase
  source 1..1182: mol_type = other DNA
atgcaccatcatcaccatcacgggggctccggccatccggaaggtaataccccggagaaggaggtgccgagcgttatcgcccgtcatgttagtccgtacgcgtgccagcgcaagaccacgctgaataactacaacaaaaagatcaccgacgcgctggagatcatggccgagaactacaagtttaaagagaacctgcaggcgcgcctggaggcccgtcgcgccgcgagtgtcctgaaaagcctgccgttcgaggttaccagcatgaaagacatccaaggtctgccgtgcattaccgacgacgtacgtcctgtgatcgaagagatcatcgaagtaggcgagagcagccgtgttaaagaaatcctcaatgacgagcgctacaaggcgtttaagcagttcaccagcgtgttcggtgtgggcgtcaagaccgcggaaaagtggtaccgtatgggcctccgtacgctggaagaagtaaaggccagtaagttcctgaagctgaacaagatgcagaaggcgggcttcctgtactacgaggatctggcgagcggtgttacgaaagaagaaaaagatgccgttctggatatcgtgaaggaaacggtgtggactgttgatccggatgcgctggtggaaatcgtgggcggtttccgccgtcgcaaaccgcagggccacgacgttgacctgctgatcacgattccgggccgtcctacggatccggagctgctccacaacgtggttgatctgctcaagaagcaaggtctgctgctgtacggggacatccgtgagcgtacgttcgtggaggggcaactgccaaatcctgcgccggaccagctggacggccatcagaagtgcttcgccattctcaagctgtaccgcccgaaggtggataacagtgcggttgggacgtcgaagaaagtcgacatggctgaggttaaggattggaaagcggttcgtgtggatctggtggtcgctccagatgagcagttcgcctatgcgaaactcggttggacgggcagcggcatgtttcgtcgcgatactcgtcgctacgcggaggaagagcgcgatatgctgctcgacaaccatggtctctacgacctgaaaaagggcatttttctgagtgcggacagcgaagaagagattttcggtcatctggacctggattatctggagccgtggtatcgcaacgcg

SEQ ID NO: 6536 - protein, 394 aa, synthetic construct
  REGION 1..394: note = Variant of terminal deoxynucleotidyl transferase
MHHHHHHGGSGHPEGNTPEKEVPSVIARHVSPYACQRKTTLNNYNKKITDALEIMAENYKFKENLQARLEARRAASVLKSLPFEVTSMKDIQGLPCITDDVRPVIEEIIEVGESSRVKEILNDERYKAFKQFTSVFGVGVKTAEKWYRMGLRTLEEVKASKFLKLNKMQKAGFLYYEDLASGVTKEEKDAVLDIVKETVWTVDPDALVEIVGGFRRRKPQGHDVDLLITIPGRPTDPELLHNVVDLLKKQGLLLYGDIRERTFVEGQLPNPAPDQLDGHQKCFAILKLYRPKVDNSAVGTSKKVDMAEVKDWKAVRVDLVVAPDEQFAYAKLGWTGSGMFRRDTRRYAEEERDMLLDNHGLYDLKKGIFLSADSEEEIFGHLDLDYLEPWYRNA

SEQ ID NO: 6537 - DNA, 1182 bp, synthetic construct
  misc_feature 1..1182: note = Variant of terminal deoxynucleotidyl transferase
  source 1..1182: mol_type = other DNA
atgcaccatcatcaccatcacgggggctccggccatccggaaggtaataccccggagaaggaggtgccgagcgttatcgcccgtcatgttagtccgtacgcgtgccagcgcaagaccacgctgaataactacaacaaaaagatcaccgacgcgctggagatcatggccgagaactacaagtttaaagagaacctgcaggcgcgcctggaggcccgtcgcgccgcgagtgtcctgaaaagcctgccgttcgaggttaccagcatgaaagacatccaaggtctgccgtgcattaccgacgacgtacgtcctgtgatcgaagagatcatcgaagtaggcgagagcagccgtgttaaagaaatcctcaatgacgagcgctacaaggcctttaagcagttcaccagcgtgttcggtgtgggcgtcaagaccgcggaaaagtggtaccgtatgggcctccgtacgctgaaagaagtaaaggccagtaagttcctgaagctgaacaagatgcagaaggcgggcttcctgtactacgaggatctggcgagcggtgttacgaaagaagaaaaagatgccgttctggatatcgtgaaggaaacggtgtggactgttgatccggatgcgctggtggaaatcgtgggcggtttccgccgtcgcaaaccacagggccacgacgttgacctgctgatcacgattccgggccgtcctacggatccggagctgctccacaacgtggttgatctgctcaagaagcaaggtctgctgctgtacggggacatccgtgagcgtacgttcgtggaggggcaactgccaaatcctgcgccggaccagctggacggccatcagaagtgcttcgccattctcaagctgtaccgcccgaaggtggataacagtgcggttgggacgtcgaagaaagtcgacatggctgaggttaaggattggaaagcggttcgtgtggatctggtggtcgctccagatgagcagttcgcctatgcgaaactcggttggacgggcagcggcatgtttcgtcgcgatactcgtcgctacgcggaggaagagcgcgacatgctgctcgacaaccatggtctctacgacctgaaaaagggcatttttctgagtgcggatagcgaagaagagattttcggtcatctggacctggattatctggagccgtggtatcgcaacgcg

SEQ ID NO: 6538 - protein, 394 aa, synthetic construct
  REGION 1..394: note = Variant of terminal deoxynucleotidyl transferase
MHHHHHHGGSGHPEGNTPEKEVPSVIARHVSPYACQRKTTLNNYNKKITDALEIMAENYKFKENLQARLEARRAASVLKSLPFEVTSMKDIQGLPCITDDVRPVIEEIIEVGESSRVKEILNDERYKAFKQFTSVFGVGVKTAEKWYRMGLRTLKEVKASKFLKLNKMQKAGFLYYEDLASGVTKEEKDAVLDIVKETVWTVDPDALVEIVGGFRRRKPQGHDVDLLITIPGRPTDPELLHNVVDLLKKQGLLLYGDIRERTFVEGQLPNPAPDQLDGHQKCFAILKLYRPKVDNSAVGTSKKVDMAEVKDWKAVRVDLVVAPDEQFAYAKLGWTGSGMFRRDTRRYAEEERDMLLDNHGLYDLKKGIFLSADSEEEIFGHLDLDYLEPWYRNA

SEQ ID NO: 6539 - DNA, 1182 bp, synthetic construct
  misc_feature 1..1182: note = Variant of terminal deoxynucleotidyl transferase
  source 1..1182: mol_type = other DNA
atgcaccatcatcaccatcacgggggctccggccatccggaaggtaataccccggagaaggaggtgccgagcgttatcgcccgtcatgttagtccgtacgcgtgccagcgcaagaccacgctgaataactacaacaaaaagatcaccgacgcgctggagatcatggccgagaactacaagtttaaagagaacatgcaggcgcgcctggaggcccgtcgcgccgcgagtgtcctgaaaagcctgccgttcgaggttaccagcatgaaagacatccaaggtctgccgtgcattaccgacgacgtacgtcctgtgatcgaagagatcatcgaagtaggcgagagcagccgtgttaaagaaatcctcaatgacgagcgctacaaggcctttaagcagttcaccagcgtgttcggtgtgggcgtcaagaccgcggaaaagtggtaccgtatgggcctccgtacgctggaagaagtaaaggcaagtaagttcctgaagctgaacaagatgcagaaggcgggcttcctgtactacgaggatctggcgagcggtgttacgaaagaagaaaaagatgccgttctggatatcgtgaaggaaacggtgtggactgttgatccggatgcgctggtggaaatcgtgggcggtttccgccgtcgcaaaccacagggccacgacgttgacctgctgatcacgattccgggccgtcctacggatccggagctgctccacaacgtggttgatctgctcaagaagcaaggtctgctgctgtacggggacatccgtgagcgtacgttcgtggaggggcaactgccaaatcctgcgccggaccagctggacggccatcagaagtgcttcgccattctcaagctgtaccgcccgaaggtggataacagtgcggttgggacgtcgaagaaagtcgacatggctgaggttaaggattggaaagcggttcgtgtggatctggtggtcgctccagatgagcagttcgcctatgcgaaactcggttggacgggcagcggcatgtttcgtcgcgatactcgtcgctacgcggaggaagagaaaaatatgctgctcgacaaccatggtctctacgacctgaaaaagggcatttttctgccggcggatagcgaagaagagattttcggtcatctggacctggattatctggagccgtggtatcgcaacgcg

SEQ ID NO: 6540 - protein, 394 aa, synthetic construct
  REGION 1..394: note = Variant of terminal deoxynucleotidyl transferase
MHHHHHHGGSGHPEGNTPEKEVPSVIARHVSPYACQRKTTLNNYNKKITDALEIMAENYKFKENMQARLEARRAASVLKSLPFEVTSMKDIQGLPCITDDVRPVIEEIIEVGESSRVKEILNDERYKAFKQFTSVFGVGVKTAEKWYRMGLRTLEEVKASKFLKLNKMQKAGFLYYEDLASGVTKEEKDAVLDIVKETVWTVDPDALVEIVGGFRRRKPQGHDVDLLITIPGRPTDPELLHNVVDLLKKQGLLLYGDIRERTFVEGQLPNPAPDQLDGHQKCFAILKLYRPKVDNSAVGTSKKVDMAEVKDWKAVRVDLVVAPDEQFAYAKLGWTGSGMFRRDTRRYAEEEKNMLLDNHGLYDLKKGIFLPADSEEEIFGHLDLDYLEPWYRNA

SEQ ID NO: 6541 - DNA, 1182 bp, synthetic construct
  misc_feature 1..1182: note = Variant of terminal deoxynucleotidyl transferase
  source 1..1182: mol_type = other DNA
atgcaccatcatcaccatcacgggggctccggccatccggaaggtaataccccggagaaggaggtgccgagcgttatcgcccgtcatgttagtccgtacgcgtgccagcgcaagaccacgctgaataactacaacaaaaagatcaccgacgcgctggagatcatggccgagaactacaagtttaaagagaacctgcaggcgcgcctggaggcccgtcgcgccgcgagtgtcctgaaaagcctgccgttcgaggttaccagcatgaaagacatccaaggtctgccgtgcattaccgacgacgtacgtcctgtgatcgaagagatcatcgaagtaggcgagagcagccgtgttaaagaaatcctcaatgacgagcgctacaaggcgtttaagcagttcaccagcgtgttcggtgtgggcgtcaagaccgcggaaaagtggtaccgtatgggcaaacgtacgctggaggaagtaaaggccagtaagttcctgaagctgaacaagatgcagaaggcgggcttcctgtactacgaggatctggcgagcggtgttacgaaagaagaaaaagatgccgttctggatatcgtgaaggaaacggtgtggactgttgatccggatgcgctggtggaaatcgtgggcggtttccgccgtcgcaaaccacagggccacgacgttgacctgctgatcacgattccgggccgtcctacggatccggagctgctccacaacgtggttgatctgctcaagaagcaaggtctgctgctgtacggggacatccgtgagcgtacgttcgtggaggggcaactgccaaatcctgcgccggaccagctggacggccatcagaagtgcttcgccattctcaagctgtaccgcccgaaggtggataacagtgcggttgggacgtcgaagaaagtcgacatggctgaggttaaggattggaaagcggttcgtgtggatctggtggtcgctccagatgagcagttcgcctatgcgaaactcggttggacgggcagcggcatgtttcgtcgcgatactcgtcgctacgcggaggaagagcgcgacatgctgctcgacaaccatggtctctacgacctgaaaaagggcatttttctgagtgcggatagcgaagaagagattttcggtcatctggacctggattatctggagccgtggtatcgcaacgcg

SEQ ID NO: 6542 - protein, 394 aa, synthetic construct
  REGION 1..394: note = Variant of terminal deoxynucleotidyl transferase
MHHHHHHGGSGHPEGNTPEKEVPSVIARHVSPYACQRKTTLNNYNKKITDALEIMAENYKFKENLQARLEARRAASVLKSLPFEVTSMKDIQGLPCITDDVRPVIEEIIEVGESSRVKEILNDERYKAFKQFTSVFGVGVKTAEKWYRMGKRTLEEVKASKFLKLNKMQKAGFLYYEDLASGVTKEEKDAVLDIVKETVWTVDPDALVEIVGGFRRRKPQGHDVDLLITIPGRPTDPELLHNVVDLLKKQGLLLYGDIRERTFVEGQLPNPAPDQLDGHQKCFAILKLYRPKVDNSAVGTSKKVDMAEVKDWKAVRVDLVVAPDEQFAYAKLGWTGSGMFRRDTRRYAEEERDMLLDNHGLYDLKKGIFLSADSEEEIFGHLDLDYLEPWYRNA

SEQ ID NO: 6543 - DNA, 1182 bp, synthetic construct
  misc_feature 1..1182: note = Variant of terminal deoxynucleotidyl transferase
  source 1..1182: mol_type = other DNA
atgcaccatcatcaccatcacgggggctccggccatccggaaggtaataccccggagaaggaggtgccgagcgttatcgcccgtcatgttagtccgtacgcgtgccagcgcaagaccacgctgaataactacaacaaaaagatcaccgacgcgctggagatcatggccgagaactacaagtttaaagagaacctgcaggcgcgcctggaggcccgtcgcgccgcgagtgtcctgaaaagcctgccgttcgaggttaccagcatgaaagacatccaaggtctgccgtgcattaccgacgacgtacgtcctgtgatcgaagagatcatcgaagtaggcgagagcagccgtgttaaagaaatcctcaatgacgagcgctacaaggcgtttaagcagttcaccagcgtgttcggtgtgggcgtcaagaccgcggaaaagtggtaccgtatgggcctccgtacgctggaagaagtaaaggccagtaagttcctgaagctgaacaagatgcagaaggcgggcttcctgtactacgaggatctggcgagcggtgttacgaaagaagaaaaagatgccgttctggatatcgtgaaggaaacggtgtggactgttgatccggatgcgctggtggaaatcgtgggcggtttccgccgtcgcaaaacgcagggccacgacgttgacctgctgattacgattccgggccgtcctacggatccggagctgctccacaacgtggttgatctgctcaagaagcaaggtctgctgctgtacggggacatccgtgagcgtacgttcgtggaggggcaactgccaaatcctgcgccggaccagctggacggccatcagaagtgcttcgccattctcaagctgtaccgcccgaaggtggataacagtgcggttgggacgtcgaagaaagtcgacatggctgaggttaaggattggaaagcggttcgtgtggatctggtggtcgctccagatgagcagttcgcctatgcgaaactcggttggacgggcagcggcatgtttcgtcgcgatactcgtcgctacgcggaggaagagaaaaatatgctgctcgacaaccatggtctctacgacctgaaaaagggcatttttctgccggcggatagcgaagaagagattttcggtcatctggacctggattatctggagccgtggtatcgcaacgcg

SEQ ID NO: 6544 - protein, 394 aa, synthetic construct
  REGION 1..394: note = Variant of terminal deoxynucleotidyl transferase
MHHHHHHGGSGHPEGNTPEKEVPSVIARHVSPYACQRKTTLNNYNKKITDALEIMAENYKFKENLQARLEARRAASVLKSLPFEVTSMKDIQGLPCITDDVRPVIEEIIEVGESSRVKEILNDERYKAFKQFTSVFGVGVKTAEKWYRMGLRTLEEVKASKFLKLNKMQKAGFLYYEDLASGVTKEEKDAVLDIVKETVWTVDPDALVEIVGGFRRRKTQGHDVDLLITIPGRPTDPELLHNVVDLLKKQGLLLYGDIRERTFVEGQLPNPAPDQLDGHQKCFAILKLYRPKVDNSAVGTSKKVDMAEVKDWKAVRVDLVVAPDEQFAYAKLGWTGSGMFRRDTRRYAEEEKNMLLDNHGLYDLKKGIFLPADSEEEIFGHLDLDYLEPWYRNA

SEQ ID NO: 6545 - DNA, 1182 bp, synthetic construct
  misc_feature 1..1182: note = Variant of terminal deoxynucleotidyl transferase
  source 1..1182: mol_type = other DNA
atgcaccatcatcaccatcacgggggctccggccatccggaaggtaataccccggagaaggaggtgccgagcgttatcgcccgtcatgttagtccgtacgcgtgccagcgcaagaccacgctgaataactacaacaaaaagatcaccgacgcgctggagatcatggccgagaactacaagtttaaagagaacatgcaggcgcgcctggaggcccgtcgcgccgcgagtgtcctgaaaagcctgccgttcgaggttaccagcatgaaagacatccaaggtctgccgtgcattaccgacgacgtacgtcctgtgatcgaagagatcatcgaagtaggcgagagcagccgtgttaaagaaatcctcaatgacgagcgctacaaggcgtttaagcagttcaccagcgtgttcggtgtgggcgtcaagaccgcggaaaagtggtaccgtatgggcctgcgtacgctgaaggaagtaaaggccagtaagttcctgaagctgaacaagatgcagaaggcgggcttcctgtactacgaggatctggcgagcggtgttacgaaagaagaaaaagatgccgttctggatatcgtgaaggaaacggtgtggactgttgatccggatgcgctggtggaaatcgtgggcggtttccgccgtcgcaaaccacagggccacgacgttgacctgctgatcacgattccgggccgtcctacggatccggagctgctccacaacgtggttgatctgctcaagaagcaaggtctgctgctgtacggggacatccgtgagcgtacgttcgtggaggggcaactgccaaatcctgcgccggaccagctggacggccatcagaagtgcttcgccattctcaagctgtaccgcccgaaggtggataacagtgcggttgggacgtcgaagaaagtcgacatggctgaggttaaggattggaaagcggttcgtgtggatctggtggtcgctccagatgagcagttcgcctatgcgaaactcggttggacgggcagcggcatgtttcgtcgcgatactcgtcgctacgcggaggaagagaaaaatatgctgctcgacaaccatggtctctacgacctgaaaaagggcatttttctgagtgcggacagcgaagaagagattttcggtcatctggacctggattatctggagccgtggtatcgcaacgcg

SEQ ID NO: 6546 - protein, 394 aa, synthetic construct
  REGION 1..394: note = Variant of terminal deoxynucleotidyl transferase
MHHHHHHGGSGHPEGNTPEKEVPSVIARHVSPYACQRKTTLNNYNKKITDALEIMAENYKFKENMQARLEARRAASVLKSLPFEVTSMKDIQGLPCITDDVRPVIEEIIEVGESSRVKEILNDERYKAFKQFTSVFGVGVKTAEKWYRMGLRTLKEVKASKFLKLNKMQKAGFLYYEDLASGVTKEEKDAVLDIVKETVWTVDPDALVEIVGGFRRRKPQGHDVDLLITIPGRPTDPELLHNVVDLLKKQGLLLYGDIRERTFVEGQLPNPAPDQLDGHQKCFAILKLYRPKVDNSAVGTSKKVDMAEVKDWKAVRVDLVVAPDEQFAYAKLGWTGSGMFRRDTRRYAEEEKNMLLDNHGLYDLKKGIFLSADSEEEIFGHLDLDYLEPWYRNA

SEQ ID NO: 6547 - DNA, 1182 bp, synthetic construct
  misc_feature 1..1182: note = Variant of terminal deoxynucleotidyl transferase
  source 1..1182: mol_type = other DNA
atgcaccatcatcaccatcacgggggctccggccatccggaaggtaataccccggagaaggaggtgccgagcgttatcgcccgtcatgttagtccgtacgcgtgccagcgcaagaccacgctgaataactacaacaaaaagatcaccgacgcgctggagatcatggccgagaactacaagtttaaagagaacctgcaggcgcgcctggaggcccgtcgcgccgcgagtgtcctgaaaagcctgccgttcgaggttaccagcatgaaagacatccaaggtctgccgtgcattaccgacgacgtacgtcctgtgatcgaagagatcatcgaagtaggcgagagcagccgtgttaaagaaatcctcaatgacgagcgctacaaggcgtttaagcagttcaccagcgtgttcggtgtgggcgtcaagaccgcggaaaagtggtaccgtatgggcctgcgtacgctggaggaagtaaaggccagtaagttcctgaagctgaacaagatgcagaaggcgggcttcctgtactacgaggatctggcgagcggtgttacgaaagaagaaaaagatgccgttctggatatcgtgaaggaaacggtgtggactgttgatccggatgcgctggtggaaatcgtgggcggtttccgccgtcgcaaaacgcagggccacgacgttgacctgctgattacgattccgggccgtcctacggatccggagctgctccacaacgtggttgatctgctcaagaagcaaggtctgctgctgtacggggacatccgtgagcgtacgttcgtggaggggcaactgccaaatcctgcgccggaccagctggacggccatcagaagtgcttcgccattctcaagctgtaccgcccgaaggtggataacagtgcggttgggacgtcgaagaaagtcgacatggctgaggttaaggattggaaagcggttcgtgtggatctggtggtcgctccagatgagcagttcgcctatgcgaaactcggttggacgggcagcggcatgtttcgtcgcgatactcgtcgctacgcggaggaagagcgcgacatgctgctcgacaaccatggtctctacgacctgaaaaagggcatttttctgccggcggatagcgaagaagagattttcggtcatctggacctggattatctggagccgtggtatcgcaacgcg

SEQ ID NO: 6548 - protein, 394 aa, synthetic construct
  REGION 1..394: note = Variant of terminal deoxynucleotidyl transferase
MHHHHHHGGSGHPEGNTPEKEVPSVIARHVSPYACQRKTTLNNYNKKITDALEIMAENYKFKENLQARLEARRAASVLKSLPFEVTSMKDIQGLPCITDDVRPVIEEIIEVGESSRVKEILNDERYKAFKQFTSVFGVGVKTAEKWYRMGLRTLEEVKASKFLKLNKMQKAGFLYYEDLASGVTKEEKDAVLDIVKETVWTVDPDALVEIVGGFRRRKTQGHDVDLLITIPGRPTDPELLHNVVDLLKKQGLLLYGDIRERTFVEGQLPNPAPDQLDGHQKCFAILKLYRPKVDNSAVGTSKKVDMAEVKDWKAVRVDLVVAPDEQFAYAKLGWTGSGMFRRDTRRYAEEERDMLLDNHGLYDLKKGIFLPADSEEEIFGHLDLDYLEPWYRNA

SEQ ID NO: 6549 - DNA, 1182 bp, synthetic construct
  misc_feature 1..1182: note = Variant of terminal deoxynucleotidyl transferase
  source 1..1182: mol_type = other DNA
atgcaccatcatcaccatcacgggggctccggccatccggaaggtaataccccggagaaggaggtgccgagcgttatcgcccgtcatgttagtccgtacgcgtgccagcgcaagaccacgctgaataactacaacaaaaagatcaccgacgcgctggagatcatggccgagaactacaagtttaaagagaacatgcaggcgcgcctggaggcccgtcgcgccgcgagtgtcctgaaaagcctgccgttcgaggttaccagcatgaaagacatccaaggtctgccgtgcattaccgacgacgtacgtcctgtgatcgaagagatcatcgaagtaggcgagagcagccgtgttaaagaaatcctcaatgacgagcgctacaaggcgtttaagcagttcaccagcgtgttcggtgtgggcgtcaagaccgcggaaaagtggtaccgtatgggcctccgtacgctggaagaagtaaaggccagtaagttcctgaagctgaacaagatgcagaaggcgggcttcctgtactacgaggatctggcgagcggtgttacgaaagaagaaaaagatgccgttctggatatcgtgaaggaaacggtgtggactgttgatccggatgcgctggtgaccatcgtgggcggtttccgccgtcgcaaaccacagggccacgacgttgacctgctgattacgattccgggccgtcctacggatccggagctgctccacaacgtggttgatctgctcaagaagcaaggtctgctgctgtacggggacatccgtgagcgtacgttcgtggaggggcaactgccaaatcctgcgccggaccagctggacggccatcagaagtgcttcgccattctcaagctgtaccgcccgaaggtggataacagtgcggttgggacgtcgaagaaagtcgacatggctgaggttaaggattggaaagcggttcgtgtggatctggtggtcgctccagatgagcagttcgcctatgcgaaactcggttggacgggcagcggcatgtttcgtcgcgatactcgtcgctacgcggaggaagagaaaaatatgctgctcgacaaccatggtctctacgacctgaaaaagggcatttttctgccggcggatagcgaagaagagattttcggtcatctggacctggattatctggagccgtggtatcgcaacgcg

SEQ ID NO: 6550 - protein, 394 aa, synthetic construct
  REGION 1..394: note = Variant of terminal deoxynucleotidyl transferase
MHHHHHHGGSGHPEGNTPEKEVPSVIARHVSPYACQRKTTLNNYNKKITDALEIMAENYKFKENMQARLEARRAASVLKSLPFEVTSMKDIQGLPCITDDVRPVIEEIIEVGESSRVKEILNDERYKAFKQFTSVFGVGVKTAEKWYRMGLRTLEEVKASKFLKLNKMQKAGFLYYEDLASGVTKEEKDAVLDIVKETVWTVDPDALVTIVGGFRRRKPQGHDVDLLITIPGRPTDPELLHNVVDLLKKQGLLLYGDIRERTFVEGQLPNPAPDQLDGHQKCFAILKLYRPKVDNSAVGTSKKVDMAEVKDWKAVRVDLVVAPDEQFAYAKLGWTGSGMFRRDTRRYAEEEKNMLLDNHGLYDLKKGIFLPADSEEEIFGHLDLDYLEPWYRNA

SEQ ID NO: 6551 - DNA, 1182 bp, synthetic construct
  misc_feature 1..1182: note = Variant of terminal deoxynucleotidyl transferase
  source 1..1182: mol_type = other DNA
atgcaccatcatcaccatcacgggggctccggccatccggaaggtaataccccggagaaggaggtgccgagcgttatcgcccgtcatgttagtccgtacgcgtgccagcgcaagaccacgctgaataactacaacaaaaagatcaccgacgcgctggagatcatggccgagaactacaagtttaaagagaacatgcaggcgcgcctggaggcccgtcgcgccgcgagtgtcctgaaaagcctgccgttcgaggttaccagcatgaaagacatccaaggtctgccgtgcattaccgacgacgtacgtcctgtgatcgaagagatcatcgaagtaggcgagagcagccgtgttaaagaaatcctcaatgacgagcgctacaaggcgtttaagcagttcaccagcgtgttcggtgtgggcgtcaagaccgcggaaaagtggtaccgtatgggcctgcgtacgctgaaggaagtaaaggccagtaagttcctgaagctgaacaagatgcagaaggcgggcttcctgtactacgaggatctggcgagcggtgttacgaaagaagaaaaagatgccgttctggatatcgtgaaggaaacggtgtggactgttgatccggatgcgctggtggaaatcgtgggcggtttccgccgtcgcaaaccacagggccacgacgttgacctgctgattacgattccgggccgtcctacggatccggagctgctccacaacgtggttgatctgctcaagaagcaaggtctgctgctgtacggggacatccgtgagcgtacgttcgtggaggggcaactgccaaatcctgcgccggaccagctggacggccatcagaagtgcttcgccattctcaagctgtaccgcccgaaggtggataacagtgcggttgggacgtcgaagaaagtcgacatggctgaggttaaggattggaaagcggttcgtgtggatctggtggtcgctccagatgagcagttcgcctatgcgaaactcggttggacgggcagcggcatgtttcgtcgcgatactcgtcgctacgcggaggaagagcgcgatatgctgctcgacaaccatggtctctacgacctgaaaaagggcatttttctgagtgcggatagcgaagaagagattttcggtcatctggacctggattatctggagccgtggtatcgcaacgcg

SEQ ID NO: 6552 - protein, 394 aa, synthetic construct
  REGION 1..394: note = Variant of terminal deoxynucleotidyl transferase
MHHHHHHGGSGHPEGNTPEKEVPSVIARHVSPYACQRKTTLNNYNKKITDALEIMAENYKFKENMQARLEARRAASVLKSLPFEVTSMKDIQGLPCITDDVRPVIEEIIEVGESSRVKEILNDERYKAFKQFTSVFGVGVKTAEKWYRMGLRTLKEVKASKFLKLNKMQKAGFLYYEDLASGVTKEEKDAVLDIVKETVWTVDPDALVEIVGGFRRRKPQGHDVDLLITIPGRPTDPELLHNVVDLLKKQGLLLYGDIRERTFVEGQLPNPAPDQLDGHQKCFAILKLYRPKVDNSAVGTSKKVDMAEVKDWKAVRVDLVVAPDEQFAYAKLGWTGSGMFRRDTRRYAEEERDMLLDNHGLYDLKKGIFLSADSEEEIFGHLDLDYLEPWYRNA

SEQ ID NO: 6553 - DNA, 1182 bp, synthetic construct
  misc_feature 1..1182: note = Variant of terminal deoxynucleotidyl transferase
  source 1..1182: mol_type = other DNA
atgcaccatcatcaccatcacgggggctccggccatccggaaggtaataccccggagaaggaggtgccgagcgttatcgcccgtcatgttagtccgtacgcgtgccagcgcaagaccacgctgaataactacaacaaaaagatcaccgacgcgctggagatcatggccgagaactacaagtttaaagagaacctgcaggcgcgcctggaggcccgtcgcgccgcgagtgtcctgaaaagcctgccgttcgaggttaccagcatgaaagacatccaaggtctgccgtgcattaccgacgacgtacgtcctgtgatcgaagagatcatcgaagtaggcgagagcagccgtgttaaagaaatcctcaatgacgagcgctacaaggcgtttaagcagttcaccagcgtgttcggtgtgggcgtcaagaccgcggaaaagtggtaccgtatgggcctgcgtacgctggaggaagtaaaggccagtaagttcctgaagctgaacaagatgcagaaggcgggcttcctgtactacgaggatctggcgagcggtgttacgaaagaagaaaaagatgccgttctggatatcgtgaaggaaacggtgtggactgttgatccggatgcgctggtggaaatcgtgggcggtttccgccgtcgcaaaccacagggccacgacgttgacctgctgattacgattccgggccgtcctacggatccggagctgctccacaacgtggttgatctgctcaagaagcaaggtctgctgctgtacggggacatccgtgagcgtacgttcgtggaggggcaactgccaaatcctgcgccggaccagctggacggccatcagaagtgcttcgccattctcaagctgtaccgcccgaaggtggataacagtgcggttgggacgtcgaagaaagtcgacatggctgaggttaaggattggaaagcggttcgtgtggatctggtggtcgctccagatgagcagttcgcctatgcgaaactcggttggacgggcagcggcatgtttcgtcgcgatactcgtcgctacgcggaggaagagcgcgatatgctgctcgacaaccatggtctctacgacctgaaaaagggcatttttctgagtgcgacgagcgaagaagagattttcggtcatctggacctggattatctggagccgtggtatcgcaacgcg

SEQ ID NO: 6554 - protein, 394 aa, synthetic construct
  REGION 1..394: note = Variant of terminal deoxynucleotidyl transferase
MHHHHHHGGSGHPEGNTPEKEVPSVIARHVSPYACQRKTTLNNYNKKITDALEIMAENYKFKENLQARLEARRAASVLKSLPFEVTSMKDIQGLPCITDDVRPVIEEIIEVGESSRVKEILNDERYKAFKQFTSVFGVGVKTAEKWYRMGLRTLEEVKASKFLKLNKMQKAGFLYYEDLASGVTKEEKDAVLDIVKETVWTVDPDALVEIVGGFRRRKPQGHDVDLLITIPGRPTDPELLHNVVDLLKKQGLLLYGDIRERTFVEGQLPNPAPDQLDGHQKCFAILKLYRPKVDNSAVGTSKKVDMAEVKDWKAVRVDLVVAPDEQFAYAKLGWTGSGMFRRDTRRYAEEERDMLLDNHGLYDLKKGIFLSATSEEEIFGHLDLDYLEPWYRNA

SEQ ID NO: 6555 - DNA, 1182 bp, synthetic construct
  misc_feature 1..1182: note = Variant of terminal deoxynucleotidyl transferase
  source 1..1182: mol_type = other DNA
atgcaccatcatcaccatcacgggggctccggccatccggaaggtaataccccggagaaggaggtgccgagcgttatcgcccgtcatgttagtccgtacgcgtgccagcgcaagaccacgctgaataactacaacaaaaagatcaccgacgcgctggagatcatggccgagaactacaagtttaaagagaacctgcaggcgcgcctggaggcccgtcgcgccgcgagtgtcctgaaaagcctgccgttcgaggttaccagcatgaaagacatccaaggtctgccgtgcattaccgacgacgtacgtcctgtgatcgaagagatcatcgaagtaggcgagagcagccgtgttaaagaaatcctcaatgacgagcgctacaaggcgtttaagcagttcaccagcgtgttcggtgtgggcgtcaagaccgcggaaaagtggtaccgtatgggcctccgtacgctggaagaagtaaaggcaagtaagttcctgaagctgaacaagatgcagaaggcgggcttcctgtactacgaggatctggcgagcggtgttacgaaagaagaaaaagatgccgttctggatatcgtgaaggaaacggtgtggactgttgatccggatgcgctggtggaaatcgtgggcggtttccgccgtcgcaaaccacagggccacgacgttgacctgctgctgacgattccgggccgtcctacggatccggagctgctccacaacgtggttgatctgctcaagaagcaaggtctgctgctgtacggggacatccgtgagcgtacgttcgtggaggggcaactgccaaatcctgcgccggaccagctggacggccatcagaagtgcttcgccattctcaagctgtaccgcccgaaggtggataacagtgcggttgggacgtcgaagaaagtcgacatggctgaggttaaggattggaaagcggttcgtgtggatctggtggtcgctccagatgagcagttcgcctatgcgaaactcggttggacgggcagcggcatgtttcgtcgcgatactcgtcgctacgcggaggaagagcgcgatatgctgctcgacaaccatggtctctacgacctgaaaaagggcatttttctgagtgcggacagcgaagaagagattttcggtcatctggacctggattatctggagccgtggtatcgcaacgcg

SEQ ID NO: 6556 - protein, 394 aa, synthetic construct
  REGION 1..394: note = Variant of terminal deoxynucleotidyl transferase
MHHHHHHGGSGHPEGNTPEKEVPSVIARHVSPYACQRKTTLNNYNKKITDALEIMAENYKFKENLQARLEARRAASVLKSLPFEVTSMKDIQGLPCITDDVRPVIEEIIEVGESSRVKEILNDERYKAFKQFTSVFGVGVKTAEKWYRMGLRTLEEVKASKFLKLNKMQKAGFLYYEDLASGVTKEEKDAVLDIVKETVWTVDPDALVEIVGGFRRRKPQGHDVDLLLTIPGRPTDPELLHNVVDLLKKQGLLLYGDIRERTFVEGQLPNPAPDQLDGHQKCFAILKLYRPKVDNSAVGTSKKVDMAEVKDWKAVRVDLVVAPDEQFAYAKLGWTGSGMFRRDTRRYAEEERDMLLDNHGLYDLKKGIFLSADSEEEIFGHLDLDYLEPWYRNA

SEQ ID NO: 6557 - DNA, 1182 bp, synthetic construct
  misc_feature 1..1182: note = Variant of terminal deoxynucleotidyl transferase
  source 1..1182: mol_type = other DNA
atgcaccatcatcaccatcacgggggctccggccatccggaaggtaataccccggagaaggaggtgccgagcgttatcgcccgtcatgttagtccgtacgcgtgccagcgcaagaccacgctgaataactacaacaaaaagatcaccgacgcgctggagatcatggccgagaactacaagtttaaagagaacctgcaggcgcgcctggaggcccgtcgcgccgcgagtgtcctgaaaagcctgccgttcgaggttaccagcatgaaagacatccaaggtctgccgtgcattaccgacgacgtacgtcctgtgatcgaagagatcatcgaagtaggcgagagcagccgtgttaaagaaatcctcaatgacgagcgctacaagaaatttaagcagttcaccagcgtgttcggtgtgggcgtcaagaccgcggaaaagtggtaccgtatgggcctgcgtacgctggaggaagtaaaggccagtaagttcctgaagctgaacaagatgcagaaggcgggcttcctgtactacgaggatctggcgagcggtgttacgaaagaagaaaaagatgccgttctggatatcgtgaaggaaacggtgtggactgttgatccggatgcgctggtggaaatcgtgggcggtttccgccgtcgcaaaccacagggccacgacgttgacctgctgctgacgattccgggccgtcctacggatccggagctgctccacaacgtggttgatctgctcaagaagcaaggtctgctgctgtacggggacatccgtgagcgtacgttcgtggaggggcaactgccaaatcctgcgccggaccagctggacggccatcagaagtgcttcgccattctcaagctgtaccgcccgaaggtggataacagtgcggttgggacgtcgaagaaagtcgacatggctgaggttaaggattggaaagcggttcgtgtggatctggtggtcgctccagatgagcagttcgcctatgcgaaactcggttggacgggcagcggcatgtttcgtcgcgatactcgtcgctacgcggaggaagagcgcgacatgctgctcgacaaccatggtctctacgacctgaaaaagggcatttttctgccggcggatagcgaagaagagattttcggtcatctggacctggattatctggagccgtggtatcgcaacgcg

SEQ ID NO: 6558 - protein, 394 aa, synthetic construct
  REGION 1..394: note = Variant of terminal deoxynucleotidyl transferase
MHHHHHHGGSGHPEGNTPEKEVPSVIARHVSPYACQRKTTLNNYNKKITDALEIMAENYKFKENLQARLEARRAASVLKSLPFEVTSMKDIQGLPCITDDVRPVIEEIIEVGESSRVKEILNDERYKKFKQFTSVFGVGVKTAEKWYRMGLRTLEEVKASKFLKLNKMQKAGFLYYEDLASGVTKEEKDAVLDIVKETVWTVDPDALVEIVGGFRRRKPQGHDVDLLLTIPGRPTDPELLHNVVDLLKKQGLLLYGDIRERTFVEGQLPNPAPDQLDGHQKCFAILKLYRPKVDNSAVGTSKKVDMAEVKDWKAVRVDLVVAPDEQFAYAKLGWTGSGMFRRDTRRYAEEERDMLLDNHGLYDLKKGIFLPADSEEEIFGHLDLDYLEPWYRNA

SEQ ID NO: 6559 - DNA, 1182 bp, synthetic construct
  misc_feature 1..1182: note = Variant of terminal deoxynucleotidyl transferase
  source 1..1182: mol_type = other DNA
atgcaccatcatcaccatcacgggggctccggccatccggaaggtaataccccggagaaggaggtgccgagcgttatcgcccgtcatgttagtccgtacgcgtgccagcgcaagaccacgctgaataactacaacaaaaagatcaccgacgcgctggagatcatggccgagaactacaagtttaaagagaacctgcaggcgcgcctggaggcccgtcgcgccgcgagtgtcctgaaaagcctgccgttcgaggttaccagcatgaaagacatccaaggtctgccgtgcattaccgacgacgtacgtcctgtgatcgaagagatcatcgaagtaggcgagagcagccgtgttaaagaaatcctcaatgacgagcgctacaaggcgtttaagcagttcaccagcgtgttcggtgtgggcgtcaagaccgcggaaaagtggtaccgtatgggcctgcgtacgctggaggaagtaaaggccagtaagttcctgaagctgaacaagatgcagaaggcgggcttcctgtactacgaggatctggcgagcggtgttacgaaagaagaaaaagatgccgttctggatatcgtgaaggaaacggtgtggactgttgatccggatgcgctggtgaccatcgtgggcggtttccgccgtcgcaaaacgcagggccacgacgttgacctgctgatcacgattccgggccgtcctacggatccggagctgctccacaacgtggttgatctgctcaagaagcaaggtctgctgctgtacggggacatccgtgagcgtacgttcgtggaggggcaactgccaaatcctgcgccggaccagctggacggccatcagaagtgcttcgccattctcaagctgtaccgcccgaaggtggataacagtgcggttgggacgtcgaagaaagtcgacatggctgaggttaaggattggaaagcggttcgtgtggatctggtggtcgctccagatgagcagttcgcctatgcgaaactcggttggacgggcagcggcatgtttcgtcgcgatactcgtcgctacgcggaggaagagaaaaatatgctgctcgacaaccatggtctctacgacctgaaaaagggcatttttctgccggcgacgagcgaagaagagattttcggtcatctggacctggattatctggagccgtggtatcgcaacgcg

SEQ ID NO: 6560 - protein, 394 aa, synthetic construct
  REGION 1..394: note = Variant of terminal deoxynucleotidyl transferase
MHHHHHHGGSGHPEGNTPEKEVPSVIARHVSPYACQRKTTLNNYNKKITDALEIMAENYKFKENLQARLEARRAASVLKSLPFEVTSMKDIQGLPCITDDVRPVIEEIIEVGESSRVKEILNDERYKAFKQFTSVFGVGVKTAEKWYRMGLRTLEEVKASKFLKLNKMQKAGFLYYEDLASGVTKEEKDAVLDIVKETVWTVDPDALVTIVGGFRRRKTQGHDVDLLITIPGRPTDPELLHNVVDLLKKQGLLLYGDIRERTFVEGQLPNPAPDQLDGHQKCFAILKLYRPKVDNSAVGTSKKVDMAEVKDWKAVRVDLVVAPDEQFAYAKLGWTGSGMFRRDTRRYAEEEKNMLLDNHGLYDLKKGIFLPATSEEEIFGHLDLDYLEPWYRNA

SEQ ID NO: 6561 - DNA, 1182 bp, synthetic construct
  misc_feature 1..1182: note = Variant of terminal deoxynucleotidyl transferase
  source 1..1182: mol_type = other DNA
atgcaccatcatcaccatcacgggggctccggccatccggaaggtaataccccggagaaggaggtgccgagcgttatcgcccgtcatgttagtccgtacgcgtgccagcgcaagaccacgctgaataactacaacaaaaagatcaccgacgcgctggagatcatggccgagaactacaagtttaaagagaacctgcaggcgcgcctggaggcccgtcgcgccgcgagtgtcctgaaaagcctgccgttcgaggttaccagcatgaaagacatccaaggtctgccgtgcattaccgacgacgtacgtcctgtgatcgaagagatcatcgaagtaggcgagagcagccgtgttaaagaaatcctcaatgacgagcgctacaaggcgtttaagcagttcaccagcgtgttcggtgtgggcgtcaagaccgcggaaaagtggtaccgtatgggcctccgtacgctggaagaagtaaaggccagtaagttcctgaagctgaacaagatgcagaaggcgggcttcctgtactacgaggatctggcgagcggtgttacgaaagaagaaaaagatgccgttctggatatcgtgaaggaaacggtgtggactgttgatccggatgcgctggtgaccatcgtgggcggtttccgccgtcgcaaaccacagggccacgacgttgacctgctgatcacgattccgggccgtcctacggatccggagctgctccacaacgtggttgatctgctcaagaagcaaggtctgctgctgtacggggacatccgtgagcgtacgttcgtggaggggcaactgccaaatcctgcgccggaccagctggacggccatcagaagtgcttcgccattctcaagctgtaccgcccgaaggtggataacagtgcggttgggacgtcgaagaaagtcgacatggctgaggttaaggattggaaagcggttcgtgtggatctggtggtcgctccagatgagcagttcgcctatgcgaaactcggttggacgggcagcggcatgtttcgtcgcgatactcgtcgctacgcggaggaagagaaaaatatgctgctcgacaaccatggtctctacgacctgaaaaagggcatttttctgagtgcggacagcgaagaagagattttcggtcatctggacctggattatctggagccgtggtatcgcaacgcg

SEQ ID NO: 6562 - protein, 394 aa, synthetic construct
  REGION 1..394: note = Variant of terminal deoxynucleotidyl transferase
MHHHHHHGGSGHPEGNTPEKEVPSVIARHVSPYACQRKTTLNNYNKKITDALEIMAENYKFKENLQARLEARRAASVLKSLPFEVTSMKDIQGLPCITDDVRPVIEEIIEVGESSRVKEILNDERYKAFKQFTSVFGVGVKTAEKWYRMGLRTLEEVKASKFLKLNKMQKAGFLYYEDLASGVTKEEKDAVLDIVKETVWTVDPDALVTIVGGFRRRKPQGHDVDLLITIPGRPTDPELLHNVVDLLKKQGLLLYGDIRERTFVEGQLPNPAPDQLDGHQKCFAILKLYRPKVDNSAVGTSKKVDMAEVKDWKAVRVDLVVAPDEQFAYAKLGWTGSGMFRRDTRRYAEEEKNMLLDNHGLYDLKKGIFLSADSEEEIFGHLDLDYLEPWYRNA

SEQ ID NO: 6563 - DNA, 1182 bp, synthetic construct
  misc_feature 1..1182: note = Variant of terminal deoxynucleotidyl transferase
  source 1..1182: mol_type = other DNA
atgcaccatcatcaccatcacgggggctccggccatccggaaggtaataccccggagaaggaggtgccgagcgttatcgcccgtcatgttagtccgtacgcgtgccagcgcaagaccacgctgaataactacaacaaaaagatcaccgacgcgctggagatcatggccgagaactacaagtttaaagagaacctgcaggcgcgcctggaggcccgtcgcgccgcgagtgtcctgaaaagcctgccgttcgaggttaccagcatgaaagacatccaaggtctgccgtgcattaccgacgacgtacgtcctgtgatcgaagagatcatcgaagtaggcgagagcagccgtgttaaagaaatcctcaatgacgagcgctacaaggcgtttaagcagttcaccagcgtgttcggtgtgggcgtcaagaccgcggaaaagtggtaccgtatgggcaaacgtacgctggaggaagtaaaggccagtaagttcctgaagctgaacaagatgcagaaggcgggcttcctgtactacgaggatctggcgagcggtgttacgaaagaagaaaaagatgccgttctggatatcgtgaaggaaacggtgtggactgttgatccggatgcgctggtggaaatcgtgggcggtttccgccgtcgcaaaccacagggccacgacgttgacctgctgatcacgattccgggccgtcctacggatccggagctgctccacaacgtggttgatctgctcaagaagcaaggtctgctgctgtacggggacatccgtgagcgtacgttcgtggaggggcaactgccaaatcctgcgccggaccagctggacggccatcagaagtgcttcgccattctcaagctgtaccgcccgaaggtggataacagtgcggttgggacgtcgaagaaagtcgacatggctgaggttaaggattggaaagcggttcgtgtggatctggtggtcgctccagatgagcagttcgcctatgcgaaactcggttggacgggcagcggcatgtttcgtcgcgatactcgtcgctacgcggaggaagagcgcgacatgctgctcgacaaccatggtctctacgacctgaaaaagggcatttttctgccggcggatagcgaagaagagattttcggtcatctggacctggattatctggagccgtggtatcgcaacgcg

SEQ ID NO: 6564 - protein, 394 aa, synthetic construct
  REGION 1..394: note = Variant of terminal deoxynucleotidyl transferase
MHHHHHHGGSGHPEGNTPEKEVPSVIARHVSPYACQRKTTLNNYNKKITDALEIMAENYKFKENLQARLEARRAASVLKSLPFEVTSMKDIQGLPCITDDVRPVIEEIIEVGESSRVKEILNDERYKAFKQFTSVFGVGVKTAEKWYRMGKRTLEEVKASKFLKLNKMQKAGFLYYEDLASGVTKEEKDAVLDIVKETVWTVDPDALVEIVGGFRRRKPQGHDVDLLITIPGRPTDPELLHNVVDLLKKQGLLLYGDIRERTFVEGQLPNPAPDQLDGHQKCFAILKLYRPKVDNSAVGTSKKVDMAEVKDWKAVRVDLVVAPDEQFAYAKLGWTGSGMFRRDTRRYAEEERDMLLDNHGLYDLKKGIFLPADSEEEIFGHLDLDYLEPWYRNA

SEQ ID NO: 6565 - DNA, 1182 bp, synthetic construct
  misc_feature 1..1182: note = Variant of terminal deoxynucleotidyl transferase
  source 1..1182: mol_type = other DNA
atgcaccatcatcaccatcacgggggctccggccatccggaaggtaataccccggagaaggaggtgccgagcgttatcgcccgtcatgttagtccgtacgcgtgccagcgcaagaccacgctgaataactacaacaaaaagatcaccgacgcgctggagatcatggccgagaactacaagtttaaagagaacatgcaggcgcgcctggaggcccgtcgcgccgcgagtgtcctgaaaagcctgccgttcgaggttaccagcatgaaagacatccaaggtctgccgtgcattaccgacgacgtacgtcctgtgatcgaagagatcatcgaagtaggcgagagcagccgtgttaaagaaatcctcaatgacgagcgctacaagaaatttaagcagttcaccagcgtgttcggtgtgggcgtcaagaccgcggaaaagtggtaccgtatgggcctgcgtacgctggaggaagtaaaggccagtaagttcctgaagctgaacaagatgcagaaggcgggcttcctgtactacgaggatctggcgagcggtgttacgaaagaagaaaaagatgccgttctggatatcgtgaaggaaacggtgtggactgttgatccggatgcgctggtggaaatcgtgggcggtttccgccgtcgcaaaccacagggccacgacgttgacctgctgattacgattccgggccgtcctacggatccggagctgctccacaacgtggttgatctgctcaagaagcaaggtctgctgctgtacggggacatccgtgagcgtacgttcgtggaggggcaactgccaaatcctgcgccggaccagctggacggccatcagaagtgcttcgccattctcaagctgtaccgcccgaaggtggataacagtgcggttgggacgtcgaagaaagtcgacatggctgaggttaaggattggaaagcggttcgtgtggatctggtggtcgctccagatgagcagttcgcctatgcgaaactcggttggacgggcagcggcatgtttcgtcgcgatactcgtcgctacgcggaggaagagcgcgacatgctgctcgacaaccatggtctctacgacctgaaaaagggcatttttctgccggcgacgagcgaagaagagattttcggtcatctggacctggattatctggagccgtggtatcgcaacgcg

SEQ ID NO: 6566 - protein, 394 aa, synthetic construct
  REGION 1..394: note = Variant of terminal deoxynucleotidyl transferase
MHHHHHHGGSGHPEGNTPEKEVPSVIARHVSPYACQRKTTLNNYNKKITDALEIMAENYKFKENMQARLEARRAASVLKSLPFEVTSMKDIQGLPCITDDVRPVIEEIIEVGESSRVKEILNDERYKKFKQFTSVFGVGVKTAEKWYRMGLRTLEEVKASKFLKLNKMQKAGFLYYEDLASGVTKEEKDAVLDIVKETVWTVDPDALVEIVGGFRRRKPQGHDVDLLITIPGRPTDPELLHNVVDLLKKQGLLLYGDIRERTFVEGQLPNPAPDQLDGHQKCFAILKLYRPKVDNSAVGTSKKVDMAEVKDWKAVRVDLVVAPDEQFAYAKLGWTGSGMFRRDTRRYAEEERDMLLDNHGLYDLKKGIFLPATSEEEIFGHLDLDYLEPWYRNA

SEQ ID NO: 6567 - DNA, 1182 bp, synthetic construct
  misc_feature 1..1182: note = Variant of terminal deoxynucleotidyl transferase
  source 1..1182: mol_type = other DNA
atgcaccatcatcaccatcacgggggctccggccatccggaaggtaataccccggagaaggaggtgccgagcgttatcgcccgtcatgttagtccgtacgcgtgccagcgcaagaccacgctgaataactacaacaaaaagatcaccgacgcgctggagatcatggccgagaactacaagtttaaagagaacctgcaggcgcgcctggaggcccgtcgcgccgcgagtgtcctgaaaagcctgccgttcgaggttaccagcatgaaagacatccaaggtctgccgtgcattaccgacgacgtacgtcctgtgatcgaagagatcatcgaagtaggcgagagcagccgtgttaaagaaatcctcaatgacgagcgctacaaggcgtttaagcagttcaccagcgtgttcggtgtgggcgtcaagaccgcggaaaagtggtaccgtatgggcctccgtacgctggaagaagtaaaggccagtaagttcctgaagctgaacaagatgcagaaggcgggcttcctgtactacgaggatctggcgagcggtgttacgaaagaagaaaaagatgccgttctggatatcgtgaaggaaacggtgtggactgttgatccggatgcgctggtggaaatcgtgggcggtttccgccgtcgcaaaccgcagggccacgacgttgacctgctgatcacgattccgggccgtcctacggatccggagctgctccacaacgtggttgatctgctcaagaagcaaggtctgctgctgtacggggacatccgtgagcgtacgttcgtggaggggcaactgccaaatcctgcgccggaccagctggacggccatcagaagtgcttcgccattctcaagctgtaccgcccgaaggtggataacagtgcggttgggacgtcgaagaaagtcgacatggctgaggttaaggattggaaagcggttcgtgtggatctggtggtcgctccagatgagcagttcgcctatgcgaaactcggttggacgggcagcggcatgtttcgtcgcgatactcgtcgctacgcggaggaagagcgcgacatgctgctcgacaaccatggtctctacgacctgaaaaagggcatttttctgccggcggatagcgaagaagagattttcggtcatctggacctggattatctggagccgtggtatcgcaacgcg

SEQ ID NO: 6568 - protein, 394 aa, synthetic construct
  REGION 1..394: note = Variant of terminal deoxynucleotidyl transferase
MHHHHHHGGSGHPEGNTPEKEVPSVIARHVSPYACQRKTTLNNYNKKITDALEIMAENYKFKENLQARLEARRAASVLKSLPFEVTSMKDIQGLPCITDDVRPVIEEIIEVGESSRVKEILNDERYKAFKQFTSVFGVGVKTAEKWYRMGLRTLEEVKASKFLKLNKMQKAGFLYYEDLASGVTKEEKDAVLDIVKETVWTVDPDALVEIVGGFRRRKPQGHDVDLLITIPGRPTDPELLHNVVDLLKKQGLLLYGDIRERTFVEGQLPNPAPDQLDGHQKCFAILKLYRPKVDNSAVGTSKKVDMAEVKDWKAVRVDLVVAPDEQFAYAKLGWTGSGMFRRDTRRYAEEERDMLLDNHGLYDLKKGIFLPADSEEEIFGHLDLDYLEPWYRNA

SEQ ID NO: 6569 - DNA, 1182 bp, synthetic construct
  misc_feature 1..1182: note = Variant of terminal deoxynucleotidyl transferase
  source 1..1182: mol_type = other DNA
atgcaccatcatcaccatcacgggggctccggccatccggaaggtaataccccggagaaggaggtgccgagcgttatcgcccgtcatgttagtccgtacgcgtgccagcgcaagaccacgctgaataactacaacaaaaagatcaccgacgcgctggagatcatggccgagaactacaagtttaaagagaacctgcaggcgcgcctggaggcccgtcgcgccgcgagtgtcctgaaaagcctgccgttcgaggttaccagcatgaaagacatccaaggtctgccgtgcattaccgacgacgtacgtcctgtgatcgaagagatcatcgaagtaggcgagagcagccgtgttaaagaaatcctcaatgacgagcgctacaagaaatttaagcagttcaccagcgtgttcggtgtgggcgtcaagaccgcggaaaagtggtaccgtatgggcctccgtacgctggaagaagtaaaggccagtaagttcctgaagctgaacaagatgcagaaggcgggcttcctgtactacgaggatctggcgagcggtgttacgaaagaagaaaaagatgccgttctggatatcgtgaaggaaacggtgtggactgttgatccggatgcgctggtgaccatcgtgggcggtttccgccgtcgcaaaccacagggccacgacgttgacctgctgatcacgattccgggccgtcctacggatccggagctgctccacaacgtggttgatctgctcaagaagcaaggtctgctgctgtacggggacatccgtgagcgtacgttcgtggaggggcaactgccaaatcctgcgccggaccagctggacggccatcagaagtgcttcgccattctcaagctgtaccgcccgaaggtggataacagtgcggttgggacgtcgaagaaagtcgacatggctgaggttaaggattggaaagcggttcgtgtggatctggtggtcgctccagatgagcagttcgcctatgcgaaactcggttggacgggcagcgacatgtttcgtcgcgatactcgtcgctacgcggaggaagagaaaaatatgctgctcgacaaccatggtctctacgacctgaaaaagggcatttttctgagtgcgacgagcgaagaagagattttcggtcatctggacctggattatctggagccgtggtatcgcaacgcg

SEQ ID NO: 6570 - protein, 394 aa, synthetic construct
  REGION 1..394: note = Variant of terminal deoxynucleotidyl transferase
MHHHHHHGGSGHPEGNTPEKEVPSVIARHVSPYACQRKTTLNNYNKKITDALEIMAENYKFKENLQARLEARRAASVLKSLPFEVTSMKDIQGLPCITDDVRPVIEEIIEVGESSRVKEILNDERYKKFKQFTSVFGVGVKTAEKWYRMGLRTLEEVKASKFLKLNKMQKAGFLYYEDLASGVTKEEKDAVLDIVKETVWTVDPDALVTIVGGFRRRKPQGHDVDLLITIPGRPTDPELLHNVVDLLKKQGLLLYGDIRERTFVEGQLPNPAPDQLDGHQKCFAILKLYRPKVDNSAVGTSKKVDMAEVKDWKAVRVDLVVAPDEQFAYAKLGWTGSDMFRRDTRRYAEEEKNMLLDNHGLYDLKKGIFLSATSEEEIFGHLDLDYLEPWYRNA

SEQ ID NO: 6571 - DNA, 1182 bp, synthetic construct
  misc_feature 1..1182: note = Variant of terminal deoxynucleotidyl transferase
  source 1..1182: mol_type = other DNA
atgcaccatcatcaccatcacgggggctccggccatccggaaggtaataccccggagaaggaggtgccgagcgttatcgcccgtcatgttagtccgtacgcgtgccagcgcaagaccacgctgaataactacaacaaaaagatcaccgacgcgctggagatcatggccgagaactacaagtttaaagagaacatgcaggcgcgcctggaggcccgtcgcgccgcgagtgtcctgaaaagcctgccgttcgaggttaccagcatgaaagacatccaaggtctgccgtgcattaccgacgacgtacgtcctgtgatcgaagagatcatcgaagtaggcgagagcagccgtgttaaagaaatcctcaatgacgagcgctacaaggcgtttaagcagttcaccagcgtgttcggtgtgggcgtcaagaccgcggaaaagtggtaccgtatgggcctccgtacgctggaagaagtaaaggccagtaagttcctgaagctgaacaagatgcagaaggcgggcttcctgtactacgaggatctggcgagcggtgttacgaaagaagaaaaagatgccgttctggatatcgtgaaggaaacggtgtggactgttgatccggatgcgctggtgaccatcgtgggcggtttccgccgtcgcaaaccacagggccacgacgttgacctgctgctgacgattccgggccgtcctacggatccggagctgctccacaacgtggttgatctgctcaagaagcaaggtctgctgctgtacggggacatccgtgagcgtacgttcgtggaggggcaactgccaaatcctgcgccggaccagctggacggccatcagaagtgcttcgccattctcaagctgtaccgcccgaaggtggataacagtgcggttgggacgtcgaagaaagtcgacatggctgaggttaaggattggaaagcggttcgtgtggatctggtggtcgctccagatgagcagttcgcctatgcgaaactcggttggacgggcagcggcatgtttcgtcgcgatactcgtcgctacgcggaggaagagaaaaatatgctgctcgacaaccatggtctctacgacctgaaaaagggcatttttctgagtgcgacgagcgaagaagagattttcggtcatctggacctggattatctggagccgtggtatcgcaacgcg

SEQ ID NO: 6572 - protein, 394 aa, synthetic construct
  REGION 1..394: note = Variant of terminal deoxynucleotidyl transferase
MHHHHHHGGSGHPEGNTPEKEVPSVIARHVSPYACQRKTTLNNYNKKITDALEIMAENYKFKENMQARLEARRAASVLKSLPFEVTSMKDIQGLPCITDDVRPVIEEIIEVGESSRVKEILNDERYKAFKQFTSVFGVGVKTAEKWYRMGLRTLEEVKASKFLKLNKMQKAGFLYYEDLASGVTKEEKDAVLDIVKETVWTVDPDALVTIVGGFRRRKPQGHDVDLLLTIPGRPTDPELLHNVVDLLKKQGLLLYGDIRERTFVEGQLPNPAPDQLDGHQKCFAILKLYRPKVDNSAVGTSKKVDMAEVKDWKAVRVDLVVAPDEQFAYAKLGWTGSGMFRRDTRRYAEEEKNMLLDNHGLYDLKKGIFLSATSEEEIFGHLDLDYLEPWYRNA

SEQ ID NO: 6573 - DNA, 1182 bp, synthetic construct
  misc_feature 1..1182: note = Variant of terminal deoxynucleotidyl transferase
  source 1..1182: mol_type = other DNA
atgcaccatcatcaccatcacgggggctccggccatccggaaggtaataccccggagaaggaggtgccgagcgttatcgcccgtcatgttagtccgtacgcgtgccagcgcaagaccacgctgaataactacaacaaaaagatcaccgacgcgctggagatcatggccgagaactacaagtttaaagagaacctgcaggcgcgcctggaggcccgtcgcgccgcgagtgtcctgaaaagcctgccgttcgaggttaccagcatgaaagacatccaaggtctgccgtgcattaccgacgacgtacgtcctgtgatcgaagagatcatcgaagtaggcgagagcagccgtgttaaagaaatcctcaatgacgagcgctacaaggcctttaagcagttcaccagcgtgttcggtgtgggcgtcaagaccgcggaaaagtggtaccgtatgggcctccgtacgctggaggaagtaaaggccagtaagttcctgaagctgaacaagatgcagaaggcgggcttcctgtactacgaggatctggcgagcggtgttacgaaagaagaaaaagatgccgttctggatatcgtgaaggaaacggtgtggactgttgatccggatgcgctggtggaaatcgtgggcggtttccgccgtcgcaaaccacagggccacgacgttgacctgctgatcacgattccgggccgtcctacggatccggagctgctccacaacgtggttgatctgctcaagaagcaaggtctgctgctgtacggggacatccgtgagcgtacgttcgtggaggggcaactgccaaatcctgcgccggaccagctggacggccatcagaagtgcttcgccattctcaagctgtaccgcccgaaggtggataacagtgcggttgggacgtcgaagaaagtcgacatggctgaggttaaggattggaaagcggttcgtgtggatctggtggtcgctccagatgagcagttcgcctatgcgaaactcggttggacgggcagcggcatgtttcgtcgcgatactcgtcgctacgcggaggaagagcgcgacatgctgctcgacaaccatggtctctacgacctgaaaaagggcatttttctgccggcgacgagcgaagaagagattttcggtcatctggacctggattatctggagccgtggtatcgcaacgcg

SEQ ID NO: 6574 - protein, 394 aa, synthetic construct
  REGION 1..394: note = Variant of terminal deoxynucleotidyl transferase
MHHHHHHGGSGHPEGNTPEKEVPSVIARHVSPYACQRKTTLNNYNKKITDALEIMAENYKFKENLQARLEARRAASVLKSLPFEVTSMKDIQGLPCITDDVRPVIEEIIEVGESSRVKEILNDERYKAFKQFTSVFGVGVKTAEKWYRMGLRTLEEVKASKFLKLNKMQKAGFLYYEDLASGVTKEEKDAVLDIVKETVWTVDPDALVEIVGGFRRRKPQGHDVDLLITIPGRPTDPELLHNVVDLLKKQGLLLYGDIRERTFVEGQLPNPAPDQLDGHQKCFAILKLYRPKVDNSAVGTSKKVDMAEVKDWKAVRVDLVVAPDEQFAYAKLGWTGSGMFRRDTRRYAEEERDMLLDNHGLYDLKKGIFLPATSEEEIFGHLDLDYLEPWYRNA

SEQ ID NO: 6575 - DNA, 1182 bp, synthetic construct
  misc_feature 1..1182: note = Variant of terminal deoxynucleotidyl transferase
  source 1..1182: mol_type = other DNA
atgcaccatcatcaccatcacgggggctccggccatccggaaggtaataccccggagaaggaggtgccgagcgttatcgcccgtcatgttagtccgtacgcgtgccagcgcaagaccacgctgaataactacaacaaaaagatcaccgacgcgctggagatcatggccgagaactacaagtttaaagagaacctgcaggcgcgcctggaggcccgtcgcgccgcgagtgtcctgaaaagcctgccgttcgaggttaccagcatgaaagacatccaaggtctgccgtgcattaccgacgacgtacgtcctgtgatcgaagagatcatcgaagtaggcgagagcagccgtgttaaagaaatcctcaatgacgagcgctacaaggcctttaagcagttcaccagcgtgttcggtgtgggcgtcaagaccgcggaaaagtggtaccgtatgggcctccgtacgctggaagaagtaaaggccagtaagttcctgaagctgaacaagatgcagaaggcgggcttcctgtactacgaggatctggcgagcggtgttacgaaagaagaaaaagatgccgttctggatatcgtgaaggaaacggtgtggactgttgatccggatgcgctggtgaccatcgtgggcggtttccgccgtcgcaaaccacagggccacgacgttgacctgctgctgacgattccgggccgtcctacggatccggagctgctccacaacgtggttgatctgctcaagaagcaaggtctgctgctgtacggggacatccgtgagcgtacgttcgtggaggggcaactgccaaatcctgcgccggaccagctggacggccatcagaagtgcttcgccattctcaagctgtaccgcccgaaggtggataacagtgcggttgggacgtcgaagaaagtcgacatggctgaggttaaggattggaaagcggttcgtgtggatctggtggtcgctccagatgagcagttcgcctatgcgaaactcggttggacgggcagcggcatgtttcgtcgcgatactcgtcgctacgcggaggaagagcgcgacatgctgctcgacaaccatggtctctacgacctgaaaaagggcatttttctgccggcggatagcgaagaagagattttcggtcatctggacctggattatctggagccgtggtatcgcaacgcg

SEQ ID NO: 6576 - protein, 394 aa, synthetic construct
  REGION 1..394: note = Variant of terminal deoxynucleotidyl transferase
MHHHHHHGGSGHPEGNTPEKEVPSVIARHVSPYACQRKTTLNNYNKKITDALEIMAENYKFKENLQARLEARRAASVLKSLPFEVTSMKDIQGLPCITDDVRPVIEEIIEVGESSRVKEILNDERYKAFKQFTSVFGVGVKTAEKWYRMGLRTLEEVKASKFLKLNKMQKAGFLYYEDLASGVTKEEKDAVLDIVKETVWTVDPDALVTIVGGFRRRKPQGHDVDLLLTIPGRPTDPELLHNVVDLLKKQGLLLYGDIRERTFVEGQLPNPAPDQLDGHQKCFAILKLYRPKVDNSAVGTSKKVDMAEVKDWKAVRVDLVVAPDEQFAYAKLGWTGSGMFRRDTRRYAEEERDMLLDNHGLYDLKKGIFLPADSEEEIFGHLDLDYLEPWYRNA

SEQ ID NO: 6577 - DNA, 1182 bp, synthetic construct
  misc_feature 1..1182: note = Variant of terminal deoxynucleotidyl transferase
  source 1..1182: mol_type = other DNA
atgcaccatcatcaccatcacgggggctccggccatccggaaggtaataccccggagaaggaggtgccgagcgttatcgcccgtcatgttagtccgtacgcgtgccagcgcaagaccacgctgaataactacaacaaaaagatcaccgacgcgctggagatcatggccgagaactacaagtttaaagagaacatgcaggcgcgcctgcaggcccgtcgcgccgcgagtgtcctgaaaagcctgccgttcgaggttaccagcatgaaagacatccaaggtctgccgtgcattaccgacgacgtacgtcctgtgatcgaagagatcatcgaagtaggcgagagcagccgtgttaaagaaatcctcaatgacgagcgctacaaggcgtttaagcagttcaccagcgtgttcggtgtgggcgtcaagaccgcggaaaagtggtaccgtatgggcctgcgtacgctgaaggaagtaaaggccagtaagttcctgaagctgaacaagatgcagaaggcgggcttcctgtactacgaggatctggcgagcggtgttacgaaagaagaaaaagatgccgttctggatatcgtgaaggaaacggtgtggactgttgatccggatgcgctggtggaaatcgtgggcggtttccgccgtcgcaaaccgcagggccacgacgttgacctgctgctgacgattccgggccgtcctacggatccggagctgctccacaacgtggttgatctgctcaagaagcaaggtctgctgctgtacggggacatccgtgagcgtacgttcgtggaggggcaactgccaaatcctgcgccggaccagctggacggccatcagaagtgcttcgccattctcaagctgtaccgcccgaaggtggataacagtgcggttgggacgtcgaagaaagtcgacatggctgaggttaaggattggaaagcggttcgtgtggatctggtggtcgctccagatgagcagttcgcctatgcgaaactcggttggacgggcagcggcatgtttcgtcgcgatactcgtcgctacgcggaggaagagcgcgatatgctgctcgacaaccatggtctctacgacctgaaaaagggcatttttctgagtgcggacagcgaagaagagattttcggtcatctggacctggattatctggagccgtggtatcgcaacgcg

SEQ ID NO: 6578 - protein, 394 aa, synthetic construct
  REGION 1..394: note = Variant of terminal deoxynucleotidyl transferase
MHHHHHHGGSGHPEGNTPEKEVPSVIARHVSPYACQRKTTLNNYNKKITDALEIMAENYKFKENMQARLQARRAASVLKSLPFEVTSMKDIQGLPCITDDVRPVIEEIIEVGESSRVKEILNDERYKAFKQFTSVFGVGVKTAEKWYRMGLRTLKEVKASKFLKLNKMQKAGFLYYEDLASGVTKEEKDAVLDIVKETVWTVDPDALVEIVGGFRRRKPQGHDVDLLLTIPGRPTDPELLHNVVDLLKKQGLLLYGDIRERTFVEGQLPNPAPDQLDGHQKCFAILKLYRPKVDNSAVGTSKKVDMAEVKDWKAVRVDLVVAPDEQFAYAKLGWTGSGMFRRDTRRYAEEERDMLLDNHGLYDLKKGIFLSADSEEEIFGHLDLDYLEPWYRNA

SEQ ID NO: 6579 - DNA, 1182 bp, synthetic construct
  misc_feature 1..1182: note = Variant of terminal deoxynucleotidyl transferase
  source 1..1182: mol_type = other DNA
atgcaccatcatcaccatcacgggggctccggccatccggaaggtaataccccggagaaggaggtgccgagcgttatcgcccgtcatgttagtccgtacgcgtgccagcgcaagaccacgctgaataactacaacaaaaagatcaccgacgcgctggagatcatggccgagaactacaagtttaaagagaacctgcaggcgcgcctggaggcccgtcgcgccgcgagtgtcctgaaaagcctgccgttcgaggttaccagcatgaaagacatccaaggtctgccgtgcattaccgacgacgtacgtcctgtgatcgaagagatcatcgaagtaggcgagagcagccgtgttaaagaaatcctcaatgacgagcgctacaaggcctttaagcagttcaccagcgtgttcggtgtgggcgtcaagaccgcggaaaagtggtaccgtatgggcaaacgtacgctggaggaagtaaaggccagtaagttcctgaagctgaacaagatgcagaaggcgggcttcctgtactacgaggatctggcgagcggtgttacgaaagaagaaaaagatgccgttctggatatcgtgaaggaaacggtgtggactgttgatccggatgcgctggtggaaatcgtgggcggtttccgccgtcgcaaaccacagggccacgacgttgacctgctgatcacgattccgggccgtcctacggatccggagctgctccacaacgtggttgatctgctcaagaagcaaggtctgctgctgtacggggacatccgtgagcgtacgttcgtggaggggcaactgccaaatcctgcgccggaccagctggacggccatcagaagtgcttcgccattctcaagctgtaccgcccgaaggtggataacagtgcggttgggacgtcgaagaaagtcgacatggctgaggttaaggattggaaagcggttcgtgtggatctggtggtcgctccagatgagcagttcgcctatgcgaaactcggttggacgggcagcggcatgtttcgtcgcgatactcgtcgctacgcggaggaagagcgcgatatgctgctcgacaaccatggtctctacgacctgaaaaagggcatttttctgagtgcgacgagcgaagaagagattttcggtcatctggacctggattatctggagccgtggtatcgcaacgcg

SEQ ID NO: 6580 - protein, 394 aa, synthetic construct
  REGION 1..394: note = Variant of terminal deoxynucleotidyl transferase
MHHHHHHGGSGHPEGNTPEKEVPSVIARHVSPYACQRKTTLNNYNKKITDALEIMAENYKFKENLQARLEARRAASVLKSLPFEVTSMKDIQGLPCITDDVRPVIEEIIEVGESSRVKEILNDERYKAFKQFTSVFGVGVKTAEKWYRMGKRTLEEVKASKFLKLNKMQKAGFLYYEDLASGVTKEEKDAVLDIVKETVWTVDPDALVEIVGGFRRRKPQGHDVDLLITIPGRPTDPELLHNVVDLLKKQGLLLYGDIRERTFVEGQLPNPAPDQLDGHQKCFAILKLYRPKVDNSAVGTSKKVDMAEVKDWKAVRVDLVVAPDEQFAYAKLGWTGSGMFRRDTRRYAEEERDMLLDNHGLYDLKKGIFLSATSEEEIFGHLDLDYLEPWYRNA

SEQ ID NO: 6581 - DNA, 1182 bp, synthetic construct
  misc_feature 1..1182: note = Variant of terminal deoxynucleotidyl transferase
  source 1..1182: mol_type = other DNA
atgcaccatcatcaccatcacgggggctccggccatccggaaggtaataccccggagaaggaggtgccgagcgttatcgcccgtcatgttagtccgtacgcgtgccagcgcaagaccacgctgaataactacaacaaaaagatcaccgacgcgctggagatcatggccgagaactacaagtttaaagagaacctgcaggcgcgcctggaggcccgtcgcgccgcgagtgtcctgaaaagcctgccgttcgaggttaccagcatgaaagacatccaaggtctgccgtgcattaccgacgacgtacgtcctgtgatcgaagagatcatcgaagtaggcgagagcagccgtgttaaagaaatcctcaatgacgagcgctacaaggcgtttaagcagttcaccagcgtgttcggtgtgggcgtcaagaccgcggaaaagtggtaccgtatgggcctccgtacgctggaagaagtaaaggcaagtaagttcctgaagctgaacaagatgcagaaggcgggcttcctgtactacgaggatctggcgagcggtgttacgaaagaagaaaaagatgccgttctggatatcgtgaaggaaacggtgtggactgttgatccggatgcgctggtgaccatcgtgggcggtttccgccgtcgcaaaccgcagggccacgacgttgacctgctgctgacgattccgggccgtcctacggatccggagctgctccacaacgtggttgatctgctcaagaagcaaggtctgctgctgtacggggacatccgtgagcgtacgttcgtggaggggcaactgccaaatcctgcgccggaccagctggacggccatcagaagtgcttcgccattctcaagctgtaccgcccgaaggtggataacagtgcggttgggacgtcgaagaaagtcgacatggctgaggttaaggattggaaagcggttcgtgtggatctggtggtcgctccagatgagcagttcgcctatgcgaaactcggttggacgggcagcggcatgtttcgtcgcgatactcgtcgctacgcggaggaagagcgcgacatgctgctcgacaaccatggtctctacgacctgaaaaagggcatttttctgccggcgacgagcgaagaagagattttcggtcatctggacctggattatctggagccgtggtatcgcaacgcg

SEQ ID NO: 6582 - protein, 394 aa, synthetic construct
  REGION 1..394: note = Variant of terminal deoxynucleotidyl transferase
MHHHHHHGGSGHPEGNTPEKEVPSVIARHVSPYACQRKTTLNNYNKKITDALEIMAENYKFKENLQARLEARRAASVLKSLPFEVTSMKDIQGLPCITDDVRPVIEEIIEVGESSRVKEILNDERYKAFKQFTSVFGVGVKTAEKWYRMGLRTLEEVKASKFLKLNKMQKAGFLYYEDLASGVTKEEKDAVLDIVKETVWTVDPDALVTIVGGFRRRKPQGHDVDLLLTIPGRPTDPELLHNVVDLLKKQGLLLYGDIRERTFVEGQLPNPAPDQLDGHQKCFAILKLYRPKVDNSAVGTSKKVDMAEVKDWKAVRVDLVVAPDEQFAYAKLGWTGSGMFRRDTRRYAEEERDMLLDNHGLYDLKKGIFLPATSEEEIFGHLDLDYLEPWYRNA

SEQ ID NO: 6583 - DNA, 1182 bp, synthetic construct
  misc_feature 1..1182: note = Variant of terminal deoxynucleotidyl transferase
  source 1..1182: mol_type = other DNA
atgcaccatcatcaccatcacgggggctccggccatccggaaggtaataccccggagaaggaggtgccgagcgttatcgcccgtcatgttagtccgtacgcgtgccagcgcaagaccacgctgaataactacaacaaaaagatcaccgacgcgctggagatcatggccgagaactacaagtttaaagagaacctgcaggcgcgcctggaggcccgtcgcgccgcgagtgtcctgaaaagcctgccgttcgaggttaccagcatgaaagacatccaaggtctgccgtgcattaccgacgacgtacgtcctgtgatcgaagagatcatcgaagtaggcgagagcagccgtgttaaagaaatcctcaatgacgagcgctacaagaaatttaagcagttcaccagcgtgttcggtgtgggcgtcaagaccgcggaaaagtggtaccgtatgggcctgcgtacgctggaggaagtaaaggccagtaagttcctgaagctgaacaagatgcagaaggcgggcttcctgtactacgaggatctggcgagcggtgttacgaaagaagaaaaagatgccgttctggatatcgtgaaggaaacggtgtggactgttgatccggatgcgctggtggaaatcgtgggcggtttccgccgtcgcaaaacgcagggccacgacgttgacctgctgatcacgattccgggccgtcctacggatccggagctgctccacaacgtggttgatctgctcaagaagcaaggtctgctgctgtacggggacatccgtgagcgtacgttcgtggaggggcaactgccaaatcctgcgccggaccagctggacggccatcagaagtgcttcgccattctcaagctgtaccgcccgaaggtggataacagtgcggttgggacgtcgaagaaagtcgacatggctgaggttaaggattggaaagcggttcgtgtggatctggtggtcgctccagatgagcagttcgcctatgcgaaactcggttggacgggcagcggcatgtttcgtcgcgatactcgtcgctacgcggaggaagagaaaaatatgctgctcgacaaccatggtctctacgacctgaaaaagggcatttttctgccggcggatagcgaagaagagattttcggtcatctggacctggattatctggagccgtggtatcgcaacgcg

SEQ ID NO: 6584 - protein, 394 aa, synthetic construct
  REGION 1..394: note = Variant of terminal deoxynucleotidyl transferase
MHHHHHHGGSGHPEGNTPEKEVPSVIARHVSPYACQRKTTLNNYNKKITDALEIMAENYKFKENLQARLEARRAASVLKSLPFEVTSMKDIQGLPCITDDVRPVIEEIIEVGESSRVKEILNDERYKKFKQFTSVFGVGVKTAEKWYRMGLRTLEEVKASKFLKLNKMQKAGFLYYEDLASGVTKEEKDAVLDIVKETVWTVDPDALVEIVGGFRRRKTQGHDVDLLITIPGRPTDPELLHNVVDLLKKQGLLLYGDIRERTFVEGQLPNPAPDQLDGHQKCFAILKLYRPKVDNSAVGTSKKVDMAEVKDWKAVRVDLVVAPDEQFAYAKLGWTGSGMFRRDTRRYAEEEKNMLLDNHGLYDLKKGIFLPADSEEEIFGHLDLDYLEPWYRNA

SEQ ID NO: 6585 - DNA, 1182 bp, synthetic construct
  misc_feature 1..1182: note = Variant of terminal deoxynucleotidyl transferase
  source 1..1182: mol_type = other DNA
atgcaccatcatcaccatcacgggggctccggccatccggaaggtaataccccggagaaggaggtgccgagcgttatcgcccgtcatgttagtccgtacgcgtgccagcgcaagaccacgctgaataactacaacaaaaagatcaccgacgcgctggagatcatggccgagaactacaagtttaaagagaacctgcaggcgcgcctggaggcccgtcgcgccgcgagtgtcctgaaaagcctgccgttcgaggttaccagcatgaaagacatccaaggtctgccgtgcattaccgacgacgtacgtcctgtgatcgaagagatcatcgaagtaggcgagagcagccgtgttaaagaaatcctcaatgacgagcgctacaagaaatttaagcagttcaccagcgtgttcggtgtgggcgtcaagaccgcggaaaagtggtaccgtatgggcctgcgtacgctggaggaagtaaaggccagtaagttcctgaagctgaacaagatgcagaaggcgggcttcctgtactacgaggatctggcgagcggtgttacgaaagaagaaaaagatgccgttctggatatcgtgaaggaaacggtgtggactgttgatccggatgcgctggtggaaatcgtgggcggtttccgccgtcgcaaaccacagggccacgacgttgacctgctgatcacgattccgggccgtcctacggatccggagctgctccacaacgtggttgatctgctcaagaagcaaggtctgctgctgtacggggacatccgtgagcgtacgttcgtggaggggcaactgccaaatcctgcgccggaccagctggacggccatcagaagtgcttcgccattctcaagctgtaccgcccgaaggtggataacagtgcggttgggacgtcgaagaaagtcgacatggctgaggttaaggattggaaagcggttcgtgtggatctggtggtcgctccagatgagcagttcgcctatgcgaaactcggttggacgggcagcggcatgtttcgtcgcgatactcgtcgctacgcggaggaagagcgcgacatgctgctcgacaaccatggtctctacgacctgaaaaagggcatttttctgccggcgacgagcgaagaagagattttcggtcatctggacctggattatctggagccgtggtatcgcaacgcg

SEQ ID NO: 6586 - protein, 394 aa, synthetic construct
  REGION 1..394: note = Variant of terminal deoxynucleotidyl transferase
MHHHHHHGGSGHPEGNTPEKEVPSVIARHVSPYACQRKTTLNNYNKKITDALEIMAENYKFKENLQARLEARRAASVLKSLPFEVTSMKDIQGLPCITDDVRPVIEEIIEVGESSRVKEILNDERYKKFKQFTSVFGVGVKTAEKWYRMGLRTLEEVKASKFLKLNKMQKAGFLYYEDLASGVTKEEKDAVLDIVKETVWTVDPDALVEIVGGFRRRKPQGHDVDLLITIPGRPTDPELLHNVVDLLKKQGLLLYGDIRERTFVEGQLPNPAPDQLDGHQKCFAILKLYRPKVDNSAVGTSKKVDMAEVKDWKAVRVDLVVAPDEQFAYAKLGWTGSGMFRRDTRRYAEEERDMLLDNHGLYDLKKGIFLPATSEEEIFGHLDLDYLEPWYRNA

SEQ ID NO: 6587 - DNA, 1182 bp, synthetic construct
  misc_feature 1..1182: note = Variant of terminal deoxynucleotidyl transferase
  source 1..1182: mol_type = other DNA
atgcaccatcatcaccatcacgggggctccggccatccggaaggtaataccccggagaaggaggtgccgagcgttatcgcccgtcatgttagtccgtacgcgtgccagcgcaagaccacgctgaataactacaacaaaaagatcaccgacgcgctggagatcatggccgagaactacaagtttaaagagaacctgcaggcgcgcctggaggcccgtcgcgccgcgagtgtcctgaaaagcctgccgttcgaggttaccagcatgaaagacatccaaggtctgccgtgcattaccgacgacgtacgtcctgtgatcgaagagatcatcgaagtaggcgagagcagccgtgttaaagaaatcctcaatgacgagcgctacaaggcgtttaagcagttcaccagcgtgttcggtgtgggcgtcaagaccgcggaaaagtggtaccgtatgggcctccgtacgctggaagaagtaaaggccagtaagttcctgaagctgaacaagatgcagaaggcgggcttcctgtactacgaggatctggcgagcggtgttacgaaagaagaaaaagatgccgttctggatatcgtgaaggaaacggtgtggactgttgatccggatgcgctgatggaaatcgtgggcggtttccgccgtcgcaaaccacagggccacgacgttgacctgctgatcacgattccgggccgtcctacggatccggagctgctccacaacgtggttgatctgctcaagaagcaaggtctgctgctgtacggggacatccgtgagcgtacgttcgtggaggggcaactgccaaatcctgcgccggaccagctggacggccatcagaagtgcttcgccattctcaagctgtaccgcccgaaggtggataacagtgcggttgggacgtcgaagaaagtcgacatggctgaggttaaggattggaaagcggttcgtgtggatctggtggtcgctccagatgagcagttcgcctatgcgaaactcggttggacgggcagcggcatgtttcgtcgcgatactcgtcgctacgcggaggaagagcgcgacatgctgctcgacaaccatggtctctacgacctgaaaaagggcatttttctgagtgcggacagcgaagaagagattttcggtcatctggacctggattatctggagccgtggtatcgcaacgcg

SEQ ID NO: 6588 - protein, 394 aa, synthetic construct
  REGION 1..394: note = Variant of terminal deoxynucleotidyl transferase
MHHHHHHGGSGHPEGNTPEKEVPSVIARHVSPYACQRKTTLNNYNKKITDALEIMAENYKFKENLQARLEARRAASVLKSLPFEVTSMKDIQGLPCITDDVRPVIEEIIEVGESSRVKEILNDERYKAFKQFTSVFGVGVKTAEKWYRMGLRTLEEVKASKFLKLNKMQKAGFLYYEDLASGVTKEEKDAVLDIVKETVWTVDPDALMEIVGGFRRRKPQGHDVDLLITIPGRPTDPELLHNVVDLLKKQGLLLYGDIRERTFVEGQLPNPAPDQLDGHQKCFAILKLYRPKVDNSAVGTSKKVDMAEVKDWKAVRVDLVVAPDEQFAYAKLGWTGSGMFRRDTRRYAEEERDMLLDNHGLYDLKKGIFLSADSEEEIFGHLDLDYLEPWYRNA

SEQ ID NO: 6589 - DNA, 1182 bp, synthetic construct
  misc_feature 1..1182: note = Variant of terminal deoxynucleotidyl transferase
  source 1..1182: mol_type = other DNA
atgcaccatcatcaccatcacgggggctccggccatccggaaggtaataccccggagaaggaggtgccgagcgttatcgcccgtcatgttagtccgtacgcgtgccagcgcaagaccacgctgaataactacaacaaaaagatcaccgacgcgctggagatcatggccgagaactacaagtttaaagagaacctgcaggcgcgcctggaggcccgtcgcgccgcgagtgtcctgaaaagcctgccgttcgaggttaccagcatgaaagacatccaaggtctgccgtgcattaccgacgacgtacgtcctgtgatcgaagagatcatcgaagtaggcgagagcagccgtgttaaagaaatcctcaatgacgagcgctacaaggcctttaagcagttcaccagcgtgttcggtgtgggcgtcaagaccgcggaaaagtggtaccgtatgggcctgcgtacgctggaggaagtaaaggccagtaagttcctgaagctgaacaagatgcagaaggcgggcttcctgtactacgaggatctggcgagcggtgttacgaaagaagaaaaagatgccgttctggatatcgtgaaggaaacggtgtggactgttgatccggatgcgctggtgaccatcgtgggcggtttccgccgtcgcaaaccgcagggccacgacgttgacctgctgatcacgattccgggccgtcctacggatccggagctgctccacaacgtggttgatctgctcaagaagcaaggtctgctgctgtacggggacatccgtgagcgtacgttcgtggaggggcaactgccaaatcctgcgccggaccagctggacggccatcagaagtgcttcgccattctcaagctgtaccgcccgaaggtggataacagtgcggttgggacgtcgaagaaagtcgacatggctgaggttaaggattggaaagcggttcgtgtggatctggtggtcgctccagatgagcagttcgcctatgcgaaactcggttggacgggcagcggcatgtttcgtcgcgatactcgtcgctacgcggaggaagagcgcgacatgctgctcgacaaccatggtctctacgacctgaaaaagggcatttttctgccggcgacgagcgaagaagagattttcggtcatctggacctggattatctggagccgtggtatcgcaacgcg

SEQ ID NO: 6590 - protein, 394 aa, synthetic construct
  REGION 1..394: note = Variant of terminal deoxynucleotidyl transferase
MHHHHHHGGSGHPEGNTPEKEVPSVIARHVSPYACQRKTTLNNYNKKITDALEIMAENYKFKENLQARLEARRAASVLKSLPFEVTSMKDIQGLPCITDDVRPVIEEIIEVGESSRVKEILNDERYKAFKQFTSVFGVGVKTAEKWYRMGLRTLEEVKASKFLKLNKMQKAGFLYYEDLASGVTKEEKDAVLDIVKETVWTVDPDALVTIVGGFRRRKPQGHDVDLLITIPGRPTDPELLHNVVDLLKKQGLLLYGDIRERTFVEGQLPNPAPDQLDGHQKCFAILKLYRPKVDNSAVGTSKKVDMAEVKDWKAVRVDLVVAPDEQFAYAKLGWTGSGMFRRDTRRYAEEERDMLLDNHGLYDLKKGIFLPATSEEEIFGHLDLDYLEPWYRNA

SEQ ID NO: 6591 - DNA, 1182 bp, synthetic construct
  misc_feature 1..1182: note = Variant of terminal deoxynucleotidyl transferase
  source 1..1182: mol_type = other DNA
atgcaccatcatcaccatcacgggggctccggccatccggaaggtaataccccggagaaggaggtgccgagcgttatcgcccgtcatgttagtccgtacgcgtgccagcgcaagaccacgctgaataactacaacaaaaagatcaccgacgcgctggagatcatggccgagaactacaagtttaaagagaacctgcaggcgcgcctggaggcccgtcgcgccgcgagtgtcctgaaaagcctgccgttcgaggttaccagcatgaaagacatccaaggtctgccgtgcattaccgacgacgtacgtcctgtgatcgaagagatcatcgaagtaggcgagagcagccgtgttaaagaaatcctcaatgacgagcgctacaaggcgtttaagcagttcaccagcgtgttcggtgtgggcgtcaagaccgcggaaaagtggtaccgtatgggcaaacgtacgctggaggaagtaaaggccagtaagttcctgaagctgaacaagatgcagaaggcgggcttcctgtactacgaggatctggcgagcggtgttacgaaagaagaaaaagatgccgttctggatatcgtgaaggaaacggtgtggactgttgatccggatgcgctggtgaccatcgtgggcggtttccgccgtcgcaaaccacagggccacgacgttgacctgctgatcacgattccgggccgtcctacggatccggagctgctccacaacgtggttgatctgctcaagaagcaaggtctgctgctgtacggggacatccgtgagcgtacgttcgtggaggggcaactgccaaatcctgcgccggaccagctggacggccatcagaagtgcttcgccattctcaagctgtaccgcccgaaggtggataacagtgcggttgggacgtcgaagaaagtcgacatggctgaggttaaggattggaaagcggttcgtgtggatctggtggtcgctccagatgagcagttcgcctatgcgaaactcggttggacgggcagcggcatgtttcgtcgcgatactcgtcgctacgcggaggaagagaaaaatatgctgctcgacaaccatggtctctacgacctgaaaaagggcatttttctgccggcgacgagcgaagaagagattttcggtcatctggacctggattatctggagccgtggtatcgcaacgcg

SEQ ID NO: 6592 - protein, 394 aa, synthetic construct
  REGION 1..394: note = Variant of terminal deoxynucleotidyl transferase
MHHHHHHGGSGHPEGNTPEKEVPSVIARHVSPYACQRKTTLNNYNKKITDALEIMAENYKFKENLQARLEARRAASVLKSLPFEVTSMKDIQGLPCITDDVRPVIEEIIEVGESSRVKEILNDERYKAFKQFTSVFGVGVKTAEKWYRMGKRTLEEVKASKFLKLNKMQKAGFLYYEDLASGVTKEEKDAVLDIVKETVWTVDPDALVTIVGGFRRRKPQGHDVDLLITIPGRPTDPELLHNVVDLLKKQGLLLYGDIRERTFVEGQLPNPAPDQLDGHQKCFAILKLYRPKVDNSAVGTSKKVDMAEVKDWKAVRVDLVVAPDEQFAYAKLGWTGSGMFRRDTRRYAEEEKNMLLDNHGLYDLKKGIFLPATSEEEIFGHLDLDYLEPWYRNA

SEQ ID NO: 6593 - DNA, 1182 bp, synthetic construct
  misc_feature 1..1182: note = Variant of terminal deoxynucleotidyl transferase
  source 1..1182: mol_type = other DNA
atgcaccatcatcaccatcacgggggctccggccatccggaaggtaataccccggagaaggaggtgccgagcgttatcgcccgtcatgttagtccgtacgcgtgccagcgcaagaccacgctgaataactacaacaaaaagatcaccgacgcgctggagatcatggccgagaactacaagtttaaagagaacatgcaggcgcgcctggaggcccgtcgcgccgcgagtgtcctgaaaagcctgccgttcgaggttaccagcatgaaagacatccaaggtctgccgtgcattaccgacgacgtacgtcctgtgatcgaagagatcatcgaagtaggcgagagcagccgtgttaaagaaatcctcaatgacgagcgctacaaggcctttaagcagttcaccagcgtgttcggtgtgggcgtcaagaccgcggaaaagtggtaccgtatgggcctgcgtacgctggaggaagtaaaggccagtaagttcctgaagctgaacaagatgcagaaggcgggcttcctgtactacgaggatctggcgagcggtgttacgaaagaagaaaaagatgccgttctggatatcgtgaaggaaacggtgtggactgttgatccggatgcgctggtgaccatcgtgggcggtttccgccgtcgcaaaccgcagggccacgacgttgacctgctgatcacgattccgggccgtcctacggatccggagctgctccacaacgtggttgatctgctcaagaagcaaggtctgctgctgtacggggacatccgtgagcgtacgttcgtggaggggcaactgccaaatcctgcgccggaccagctggacggccatcagaagtgcttcgccattctcaagctgtaccgcccgaaggtggataacagtgcggttgggacgtcgaagaaagtcgacatggctgaggttaaggattggaaagcggttcgtgtggatctggtggtcgctccagatgagcagttcgcctatgcgaaactcggttggacgggcagcggcatgtttcgtcgcgatactcgtcgctacgcggaggaagagcgcgacatgctgctcgacaaccatggtctctacgacctgaaaaagggcatttttctgagtgcggacagcgaagaagagattttcggtcatctggacctggattatctggagccgtggtatcgcaacgcg

SEQ ID NO: 6594 - protein, 394 aa, synthetic construct
  REGION 1..394: note = Variant of terminal deoxynucleotidyl transferase
MHHHHHHGGSGHPEGNTPEKEVPSVIARHVSPYACQRKTTLNNYNKKITDALEIMAENYKFKENMQARLEARRAASVLKSLPFEVTSMKDIQGLPCITDDVRPVIEEIIEVGESSRVKEILNDERYKAFKQFTSVFGVGVKTAEKWYRMGLRTLEEVKASKFLKLNKMQKAGFLYYEDLASGVTKEEKDAVLDIVKETVWTVDPDALVTIVGGFRRRKPQGHDVDLLITIPGRPTDPELLHNVVDLLKKQGLLLYGDIRERTFVEGQLPNPAPDQLDGHQKCFAILKLYRPKVDNSAVGTSKKVDMAEVKDWKAVRVDLVVAPDEQFAYAKLGWTGSGMFRRDTRRYAEEERDMLLDNHGLYDLKKGIFLSADSEEEIFGHLDLDYLEPWYRNA

SEQ ID NO: 6595 - DNA, 1182 bp, synthetic construct
  misc_feature 1..1182: note = Variant of terminal deoxynucleotidyl transferase
  source 1..1182: mol_type = other DNA
atgcaccatcatcaccatcacgggggctccggccatccggaaggtaataccccggagaaggaggtgccgagcgttatcgcccgtcatgttagtccgtacgcgtgccagcgcaagaccacgctgaataactacaacaaaaagatcaccgacgcgctggagatcatggccgagaactacaagtttaaagagaacctgcaggcgcgcctggaggcccgtcgcgccgcgagtgtcctgaaaagcctgccgttcgaggttaccagcatgaaagacatccaaggtctgccgtgcattaccgacgacgtacgtcctgtgatcgaagagatcatcgaagtaggcgagagcagccgtgttaaagaaatcctcaatgacgagcgctacaaggcctttaagcagttcaccagcgtgttcggtgtgggcgtcaagaccgcggaaaagtggtaccgtatggggctgcgtacgctggaggaagtaaaggccagtaagttcctgaagctgaacaagatgcagaaggcgggcttcctgtactacgaggatctggcgagcggtgttacgaaagaagaaaaagatgccgttctggatatcgtgaaggaaacggtgtggactgttgatccggatgcgctggtgaccatcgtgggcggtttccgccgtcgcaaaccacagggccacgacgttgacctgctgatcacgattccgggccgtcctacggatccggagctgctccacaacgtggttgatctgctcaagaagcaaggtctgctgctgtacggggacatccgtgagcgtacgttcgtggaggggcaactgccaaatcctgcgccggaccagctggacggccatcagaagtgcttcgccattctcaagctgtaccgcccgaaggtggataacagtgcggttgggacgtcgaagaaagtcgacatggctgaggttaaggattggaaagcggttcgtgtggatctggtggtcgctccagatgagcagttcgcctatgcgaaactcggttggacgggcagcggcatgtttcgtcgcgatactcgtcgctacgcggaggaagagcgcgacatgctgctcgacaaccatggtctctacgacctgaaaaagggcatttttctgagtgcgacgagcgaagaagagattttcggtcatctggacctggattatctggagccgtggtatcgcaacgcg

SEQ ID NO: 6596 - protein, 394 aa, synthetic construct
  REGION 1..394: note = Variant of terminal deoxynucleotidyl transferase
MHHHHHHGGSGHPEGNTPEKEVPSVIARHVSPYACQRKTTLNNYNKKITDALEIMAENYKFKENLQARLEARRAASVLKSLPFEVTSMKDIQGLPCITDDVRPVIEEIIEVGESSRVKEILNDERYKAFKQFTSVFGVGVKTAEKWYRMGLRTLEEVKASKFLKLNKMQKAGFLYYEDLASGVTKEEKDAVLDIVKETVWTVDPDALVTIVGGFRRRKPQGHDVDLLITIPGRPTDPELLHNVVDLLKKQGLLLYGDIRERTFVEGQLPNPAPDQLDGHQKCFAILKLYRPKVDNSAVGTSKKVDMAEVKDWKAVRVDLVVAPDEQFAYAKLGWTGSGMFRRDTRRYAEEERDMLLDNHGLYDLKKGIFLSATSEEEIFGHLDLDYLEPWYRNA

SEQ ID NO: 6597 - DNA, 1182 bp, synthetic construct
  misc_feature 1..1182: note = Variant of terminal deoxynucleotidyl transferase
  source 1..1182: mol_type = other DNA
atgcaccatcatcaccatcacgggggctccggccatccggaaggtaataccccggagaaggaggtgccgagcgttatcgcccgtcatgttagtccgtacgcgtgccagcgcaagaccacgctgaataactacaacaaaaagatcaccgacgcgctggagatcatggccgagaactacaagtttaaagagaacctgcaggcgcgcctggaggcccgtcgcgccgcgagtgtcctgaaaagcctgccgttcgaggttaccagcatgaaagacatccaaggtctgccgtgcattaccgacgacgtacgtcctgtgatcgaagagatcatcgaagtaggcgagagcagccgtgttaaagaaatcctcaatgacgagcgctacaagaaatttaagcagttcaccagcgtgttcggtgtgggcgtcaagaccgcggaaaagtggtaccgtatgggcctccgtacgctggaagaagtaaaggccagtaagttcctgaagctgaacaagatgcagaaggcgggcttcctgtactacgaggatctggcgagcggtgttacgaaagaagaaaaagatgccgttctggatatcgtgaaggaaacggtgtggactgttgatccggatgcgctggtggaaatcgtgggcggtttccgccgtcgcaaaccacagggccacgacgttgacctgctgatcacgattccgggccgtcctacggatccggagctgctccacaacgtggttgatctgctcaagaagcaaggtctgctgctgtacggggacatccgtgagcgtacgttcgtggaggggcaactgccaaatcctgcgccggaccagctggacggccatcagaagtgcttcgccattctcaagctgtaccgcccgaaggtggataacagtgcggttgggacgtcgaagaaagtcgacatggctgaggttaaggattggaaagcggttcgtgtggatctggtggtcgctccagatgagcagttcgcctatgcgaaactcggttggacgggcagcggcatgtttcgtcgcgatactcgtcgctacgcggaggaagagcgcgacatgctgctcgacaaccatggtctctacgacctgaaaaagggcatttttctgccggcggatagcgaagaagagattttcggtcatctggacctggattatctggagccgtggtatcgcaacgcg

SEQ ID NO: 6598 - protein, 394 aa, synthetic construct
  REGION 1..394: note = Variant of terminal deoxynucleotidyl transferase
MHHHHHHGGSGHPEGNTPEKEVPSVIARHVSPYACQRKTTLNNYNKKITDALEIMAENYKFKENLQARLEARRAASVLKSLPFEVTSMKDIQGLPCITDDVRPVIEEIIEVGESSRVKEILNDERYKKFKQFTSVFGVGVKTAEKWYRMGLRTLEEVKASKFLKLNKMQKAGFLYYEDLASGVTKEEKDAVLDIVKETVWTVDPDALVEIVGGFRRRKPQGHDVDLLITIPGRPTDPELLHNVVDLLKKQGLLLYGDIRERTFVEGQLPNPAPDQLDGHQKCFAILKLYRPKVDNSAVGTSKKVDMAEVKDWKAVRVDLVVAPDEQFAYAKLGWTGSGMFRRDTRRYAEEERDMLLDNHGLYDLKKGIFLPADSEEEIFGHLDLDYLEPWYRNA

SEQ ID NO: 6599 - DNA, 1182 bp, synthetic construct
  misc_feature 1..1182: note = Variant of terminal deoxynucleotidyl transferase
  source 1..1182: mol_type = other DNA
atgcaccatcatcaccatcacgggggctccggccatccggaaggtaataccccggagaaggaggtgccgagcgttatcgcccgtcatgttagtccgtacgcgtgccagcgcaagaccacgctgaataactacaacaaaaagatcaccgacgcgctggagatcatggccgagaactacaagtttaaagagaacatgcaggcgcgcctggaggcccgtcgcgccgcgagtgtcctgaaaagcctgccgttcgaggttaccagcatgaaagacatccaaggtctgccgtgcattaccgacgacgtacgtcctgtgatcgaagagatcatcgaagtaggcgagagcagccgtgttaaagaaatcctcaatgacgagcgctacaaggcgtttaagcagttcaccagcgtgttcggtgtgggcgtcaagaccgcggaaaagtggtaccgtatgggcctccgtacgctggaagaagtaaagcgtagtaagttcctgaagctgaacaagatgcagaaggcgggcttcctgtactacgaggatctggcgagcggtgttacgaaagaagaaaaagatgccgttctggatatcgtgaaggaaacggtgtggactgttgatccggatgcgctggtgaccatcgtgggcggtttccgccgtcgcaaaccacagggccacgacgttgacctgctgatcacgattccgggccgtcctacggatccggagctgctccacaacgtggttgatctgctcaagaagcaaggtctgctgctgtacggggacatccgtgagcgtacgttcgtggaggggcaactgccaaatcctgcgccggaccagctggacggccatcagaagtgcttcgccattctcaagctgtaccgcccgaaggtggataacagtgcggttgggacgtcgaagaaagtcgacatggctgaggttaaggattggaaagcggttcgtgtggatctggtggtcgctccagatgagcagttcgcctatgcgaaactcggttggacgggcagcggcatgtttcgtcgcgatactcgtcgctacgcggaggaagagcgcgacatgctgctcgacaaccatggtctctacgacctgaaaaagggcatttttctgagtgcggacagcgaagaagagattttcggtcatctggacctggattatctggagccgtggtatcgcaacgcg

SEQ ID NO: 6600 - protein, 394 aa, synthetic construct
  REGION 1..394: note = Variant of terminal deoxynucleotidyl transferase
MHHHHHHGGSGHPEGNTPEKEVPSVIARHVSPYACQRKTTLNNYNKKITDALEIMAENYKFKENMQARLEARRAASVLKSLPFEVTSMKDIQGLPCITDDVRPVIEEIIEVGESSRVKEILNDERYKAFKQFTSVFGVGVKTAEKWYRMGLRTLEEVKRSKFLKLNKMQKAGFLYYEDLASGVTKEEKDAVLDIVKETVWTVDPDALVTIVGGFRRRKPQGHDVDLLITIPGRPTDPELLHNVVDLLKKQGLLLYGDIRERTFVEGQLPNPAPDQLDGHQKCFAILKLYRPKVDNSAVGTSKKVDMAEVKDWKAVRVDLVVAPDEQFAYAKLGWTGSGMFRRDTRRYAEEERDMLLDNHGLYDLKKGIFLSADSEEEIFGHLDLDYLEPWYRNA

SEQ ID NO: 6601 - DNA, 1182 bp, synthetic construct
  misc_feature 1..1182: note = Variant of terminal deoxynucleotidyl transferase
  source 1..1182: mol_type = other DNA
atgcaccatcatcaccatcacgggggctccggccatccggaaggtaataccccggagaaggaggtgccgagcgttatcgcccgtcatgttagtccgtacgcgtgccagcgcaagaccacgctgaataactacaacaaaaagatcaccgacgcgctggagatcatggccgagaactacaagtttaaagagaacctgcaggcgcgcctggaggcccgtcgcgccgcgagtgtcctgaaaagcctgccgttcgaggttaccagcatgaaagacatccaaggtctgccgtgcattaccgacgacgtacgtcctgtgatcgaagagatcatcgaagtaggcgagagcagccgtgttaaagaaatcctcaatgacgagcgctacaaggcgtttaagcagttcaccagcgtgttcggtgtgggcgtcaagaccgcggaaaagtggtaccgtatgggcctgcgtacgctggaggaagtaaaggccagtaagttcctgaagctgaacaagatgcagaaggcgggcttcctgtactacgaggatctggcgagcggtgttacgaaagaagaaaaagatgccgttctggatatcgtgaaggaaacggtgtggactgttgatccggatgcgctggtgaccatcgtgggcggtttccgccgtcgcaaaacgcagggccacgacgttgacctgctgattacgattccgggccgtcctacggatccggagctgctccacaacgtggttgatctgctcaagaagcaaggtctgctgctgtacggggacatccgtgagcgtacgttcgtggaggggcaactgccaaatcctgcgccggaccagctggacggccatcagaagtgcttcgccattctcaagctgtaccgcccgaaggtggataacagtgcggttgggacgtcgaagaaagtcgacatggctgaggttaaggattggaaagcggttcgtgtggatctggtggtcgctccagatgagcagttcgcctatgcgaaactcggttggacgggcagcggcatgtttcgtcgcgatactcgtcgctacgcggaggaagagcgcgacatgctgctcgacaaccatggtctctacgacctgaaaaagggcatttttctgccggcgacgagcgaagaagagattttcggtcatctggacctggattatctggagccgtggtatcgcaacgcg

SEQ ID NO: 6602 - protein, 394 aa, synthetic construct
  REGION 1..394: note = Variant of terminal deoxynucleotidyl transferase
MHHHHHHGGSGHPEGNTPEKEVPSVIARHVSPYACQRKTTLNNYNKKITDALEIMAENYKFKENLQARLEARRAASVLKSLPFEVTSMKDIQGLPCITDDVRPVIEEIIEVGESSRVKEILNDERYKAFKQFTSVFGVGVKTAEKWYRMGLRTLEEVKASKFLKLNKMQKAGFLYYEDLASGVTKEEKDAVLDIVKETVWTVDPDALVTIVGGFRRRKTQGHDVDLLITIPGRPTDPELLHNVVDLLKKQGLLLYGDIRERTFVEGQLPNPAPDQLDGHQKCFAILKLYRPKVDNSAVGTSKKVDMAEVKDWKAVRVDLVVAPDEQFAYAKLGWTGSGMFRRDTRRYAEEERDMLLDNHGLYDLKKGIFLPATSEEEIFGHLDLDYLEPWYRNA

SEQ ID NO: 6603 - DNA, 1182 bp, synthetic construct
  misc_feature 1..1182: note = Variant of terminal deoxynucleotidyl transferase
  source 1..1182: mol_type = other DNA
atgcaccatcatcaccatcacgggggctccggccatccggaaggtaataccccggagaaggaggtgccgagcgttatcgcccgtcatgttagtccgtacgcgtgccagcgcaagaccacgctgaataactacaacaaaaagatcaccgacgcgctggagatcatggccgagaactacaagtttaaagagaacctgcaggcgcgcctggaggcccgtcgcgccgcgagtgtcctgaaaagcctgccgttcgaggttaccagcatgaaagacatccaaggtctgccgtgcattaccgacgacgtacgtcctgtgatcgaagagatcatcgaagtaggcgagagcagccgtgttaaagaaatcctcaatgacgagcgctacaaggcgtttaagcagttcaccagcgtgttcggtgtgggcgtcaagaccgcggaaaagtggtaccgtatgggcctccgtacgctggaagaagtaaaggccagtaagttcctgaagctgaacaagatgcagaaggcgggcttcctgtactacgaggatctggcgagcggtgttacgaaagaagaaaaagatgccgttctggatatcgtgaaggaaacggtgtggactgttgatccggatgcgctggtgaccatcgtgggcggtttccgccgtcgcaaaccacagggccacgacgttgacctgctgctgacgattccgggccgtcctacggatccggagctgctccacaacgtggttgatctgctcaagaagcaaggtctgctgctgtacggggacatccgtgagcgtacgttcgtggaggggcaactgccaaatcctgcgccggaccagctggacggccatcagaagtgcttcgccattctcaagctgtaccgcccgaaggtggataacagtgcggttgggacgtcgaagaaagtcgacatggctgaggttaaggattggaaagcggttcgtgtggatctggtggtcgctccagatgagcagttcgcctatgcgaaactcggttggacgggcagcggcatgtttcgtcgcgatactcgtcgctacgcggaggaagagcgcgacatgctgctcgacaaccatggtctctacgacctgaaaaagggcatttttctgagtgcggacagcgaagaagagattttcggtcatctggacctggattatctggagccgtggtatcgcaacgcg

SEQ ID NO: 6604 - protein, 394 aa, synthetic construct
  REGION 1..394: note = Variant of terminal deoxynucleotidyl transferase
MHHHHHHGGSGHPEGNTPEKEVPSVIARHVSPYACQRKTTLNNYNKKITDALEIMAENYKFKENLQARLEARRAASVLKSLPFEVTSMKDIQGLPCITDDVRPVIEEIIEVGESSRVKEILNDERYKAFKQFTSVFGVGVKTAEKWYRMGLRTLEEVKASKFLKLNKMQKAGFLYYEDLASGVTKEEKDAVLDIVKETVWTVDPDALVTIVGGFRRRKPQGHDVDLLLTIPGRPTDPELLHNVVDLLKKQGLLLYGDIRERTFVEGQLPNPAPDQLDGHQKCFAILKLYRPKVDNSAVGTSKKVDMAEVKDWKAVRVDLVVAPDEQFAYAKLGWTGSGMFRRDTRRYAEEERDMLLDNHGLYDLKKGIFLSADSEEEIFGHLDLDYLEPWYRNA

SEQ ID NO: 6605 - DNA, 1182 bp, synthetic construct
  misc_feature 1..1182: note = Variant of terminal deoxynucleotidyl transferase
  source 1..1182: mol_type = other DNA
atgcaccatcatcaccatcacgggggctccggccatccggaaggtaataccccggagaaggaggtgccgagcgttatcgcccgtcatgttagtccgtacgcgtgccagcgcaagaccacgctgaataactacaacaaaaagatcaccgacgcgctggagatcatggccgagaactacaagtttaaagagaacctgcaggcgcgcctggaggcccgtcgcgccgcgagtgtcctgaaaagcctgccgttcgaggttaccagcatgaaagacatccaaggtctgccgtgcattaccgacgacgtacgtcctgtgatcgaagagatcatcgaagtaggcgagagcagccgtgttaaagaaatcctcaatgacgagcgctacaaggcgtttaagcagttcaccagcgtgttcggtgtgggcgtcaagaccgcggaaaagtggtaccgtatgggcaaacgtacgctggaggaagtaaaggccagtaagttcctgaagctgaacaagatgcagaaggcgggcttcctgtactacgaggatctggcgagcggtgttacgaaagaagaaaaagatgccgttctggatatcgtgaaggaaacggtgtggactgttgatccggatgcgctggtgaccatcgtgggcggtttccgccgtcgcaaaccacagggccacgacgttgacctgctgctgacgattccgggccgtcctacggatccggagctgctccacaacgtggttgatctgctcaagaagcaaggtctgctgctgtacggggacatccgtgagcgtacgttcgtggaggggcaactgccaaatcctgcgccggaccagctggacggccatcagaagtgcttcgccattctcaagctgtaccgcccgaaggtggataacagtgcggttgggacgtcgaagaaagtcgacatggctgaggttaaggattggaaagcggttcgtgtggatctggtggtcgctccagatgagcagttcgcctatgcgaaactcggttggacgggcagcggcatgtttcgtcgcgatactcgtcgctacgcggaggaagagaaaaatatgctgctcgacaaccatggtctctacgacctgaaaaagggcatttttctgagtgcgacgagcgaagaagagattttcggtcatctggacctggattatctggagccgtggtatcgcaacgcg

SEQ ID NO: 6606 - protein, 394 aa, synthetic construct
  REGION 1..394: note = Variant of terminal deoxynucleotidyl transferase
MHHHHHHGGSGHPEGNTPEKEVPSVIARHVSPYACQRKTTLNNYNKKITDALEIMAENYKFKENLQARLEARRAASVLKSLPFEVTSMKDIQGLPCITDDVRPVIEEIIEVGESSRVKEILNDERYKAFKQFTSVFGVGVKTAEKWYRMGKRTLEEVKASKFLKLNKMQKAGFLYYEDLASGVTKEEKDAVLDIVKETVWTVDPDALVTIVGGFRRRKPQGHDVDLLLTIPGRPTDPELLHNVVDLLKKQGLLLYGDIRERTFVEGQLPNPAPDQLDGHQKCFAILKLYRPKVDNSAVGTSKKVDMAEVKDWKAVRVDLVVAPDEQFAYAKLGWTGSGMFRRDTRRYAEEEKNMLLDNHGLYDLKKGIFLSATSEEEIFGHLDLDYLEPWYRNA

SEQ ID NO: 6607 - DNA, 1182 bp, synthetic construct
  misc_feature 1..1182: note = Variant of terminal deoxynucleotidyl transferase
  source 1..1182: mol_type = other DNA
atgcaccatcatcaccatcacgggggctccggccatccggaaggtaataccccggagaaggaggtgccgagcgttatcgcccgtcatgttagtccgtacgcgtgccagcgcaagaccacgctgaataactacaacaaaaagatcaccgacgcgctggagatcatggccgagaactacaagtttaaagagaacctgcaggcgcgcctggaggcccgtcgcgccgcgagtgtcctgaaaagcctgccgttcgaggttaccagcatgaaagacatccaaggtctgccgtgcattaccgacgacgtacgtcctgtgatcgaagagatcatcgaagtaggcgagagcagccgtgttaaagaaatcctcaatgacgagcgctacaaggcgtttaagcagttcaccagcgtgttcggtgtgggcgtcaagaccgcggaaaagtggtaccgtatgggcaaacgtacgctggaggaagtaaaggccagtaagttcctgaagctgaacaagatgcagaaggcgggcttcctgtactacgaggatctggcgagcggtgttacgaaagaagaaaaagatgccgttctggatatcgtgaaggaaacggtgtggactgttgatccggatgcgctggtgaccatcgtgggcggtttccgccgtcgcaaaccgcagggccacgacgttgacctgctgatcacgattccgggccgtcctacggatccggagctgctccacaacgtggttgatctgctcaagaagcaaggtctgctgctgtacggggacatccgtgagcgtacgttcgtggaggggcaactgccaaatcctgcgccggaccagctggacggccatcagaagtgcttcgccattctcaagctgtaccgcccgaaggtggataacagtgcggttgggacgtcgaagaaagtcgacatggctgaggttaaggattggaaagcggttcgtgtggatctggtggtcgctccagatgagcagttcgcctatgcgaaactcggttggacgggcagcggcatgtttcgtcgcgatactcgtcgctacgcggaggaagagaaaaatatgctgctcgacaaccatggtctctacgacctgaaaaagggcatttttctgagtgcggacagcgaagaagagattttcggtcatctggacctggattatctggagccgtggtatcgcaacgcg

SEQ ID NO: 6608 - protein, 394 aa, synthetic construct
  REGION 1..394: note = Variant of terminal deoxynucleotidyl transferase
MHHHHHHGGSGHPEGNTPEKEVPSVIARHVSPYACQRKTTLNNYNKKITDALEIMAENYKFKENLQARLEARRAASVLKSLPFEVTSMKDIQGLPCITDDVRPVIEEIIEVGESSRVKEILNDERYKAFKQFTSVFGVGVKTAEKWYRMGKRTLEEVKASKFLKLNKMQKAGFLYYEDLASGVTKEEKDAVLDIVKETVWTVDPDALVTIVGGFRRRKPQGHDVDLLITIPGRPTDPELLHNVVDLLKKQGLLLYGDIRERTFVEGQLPNPAPDQLDGHQKCFAILKLYRPKVDNSAVGTSKKVDMAEVKDWKAVRVDLVVAPDEQFAYAKLGWTGSGMFRRDTRRYAEEEKNMLLDNHGLYDLKKGIFLSADSEEEIFGHLDLDYLEPWYRNA

SEQ ID NO: 6609 - DNA, 1182 bp, synthetic construct
  misc_feature 1..1182: note = Variant of terminal deoxynucleotidyl transferase
  source 1..1182: mol_type = other DNA
atgcaccatcatcaccatcacgggggctccggccatccggaaggtaataccccggagaaggaggtgccgagcgttatcgcccgtcatgttagtccgtacgcgtgccagcgcaagaccacgctgaataactacaacaaaaagatcaccgacgcgctggagatcatggccgagaactacaagtttaaagagaacctgcaggcgcgcctggaggcccgtcgcgccgcgagtgtcctgaaaagcctgccgttcgaggttaccagcatgaaagacatccaaggtctgccgtgcattaccgacgacgtacgtcctgtgatcgaagagatcatcgaagtaggcgagagcagccgtgttaaagaaatcctcaatgacgagcgctacaaggcgtttaagcagttcaccagcgtgttcggtgtgggcgtcaagaccgcggaaaagtggtaccgtatgggcctgcgtacgctgaaggaagtaaaggccagtaagttcctgaagctgaacaagatgcagaaggcgggcttcctgtactacgaggatctggcgagcggtgttacgaaagaagaaaaagatgccgttctggatatcgtgaaggaaacggtgtggactgttgatccggatgcgctggtgaccatcgtgggcggtttccgccgtcgcaaaccacagggccacgacgttgacctgctgctgacgattccgggccgtcctacggatccggagctgctccacaacgtggttgatctgctcaagaagcaaggtctgctgctgtacggggacatccgtgagcgtacgttcgtggaggggcaactgccaaatcctgcgccggaccagctggacggccatcagaagtgcttcgccattctcaagctgtaccgcccgaaggtggataacagtgcggttgggacgtcgaagaaagtcgacatggctgaggttaaggattggaaagcggttcgtgtggatctggtggtcgctccagatgagcagttcgcctatgcgaaactcggttggacgggcagcggcatgtttcgtcgcgatactcgtcgctacgcggaggaagagaaaaatatgctgctcgacaaccatggtctctacgacctgaaaaagggcatttttctgagtgcggatagcgaagaagagattttcggtcatctggacctggattatctggagccgtggtatcgcaacgcg

SEQ ID NO: 6610 - protein, 394 aa, synthetic construct
  REGION 1..394: note = Variant of terminal deoxynucleotidyl transferase
MHHHHHHGGSGHPEGNTPEKEVPSVIARHVSPYACQRKTTLNNYNKKITDALEIMAENYKFKENLQARLEARRAASVLKSLPFEVTSMKDIQGLPCITDDVRPVIEEIIEVGESSRVKEILNDERYKAFKQFTSVFGVGVKTAEKWYRMGLRTLKEVKASKFLKLNKMQKAGFLYYEDLASGVTKEEKDAVLDIVKETVWTVDPDALVTIVGGFRRRKPQGHDVDLLLTIPGRPTDPELLHNVVDLLKKQGLLLYGDIRERTFVEGQLPNPAPDQLDGHQKCFAILKLYRPKVDNSAVGTSKKVDMAEVKDWKAVRVDLVVAPDEQFAYAKLGWTGSGMFRRDTRRYAEEEKNMLLDNHGLYDLKKGIFLSADSEEEIFGHLDLDYLEPWYRNA

SEQ ID NO: 6611 - DNA, 1182 bp, synthetic construct
  misc_feature 1..1182: note = Variant of terminal deoxynucleotidyl transferase
  source 1..1182: mol_type = other DNA
atgcaccatcatcaccatcacgggggctccggccatccggaaggtaataccccggagaaggaggtgccgagcgttatcgcccgtcatgttagtccgtacgcgtgccagcgcaagaccacgctgaataactacaacaaaaagatcaccgacgcgctggagatcatggccgagaactacaagtttaaagagaacctgcaggcgcgcctggaggcccgtcgcgccgcgagtgtcctgaaaagcctgccgttcgaggttaccagcatgaaagacatccaaggtctgccgtgcattaccgacgacgtacgtcctgtgatcgaagagatcatcgaagtaggcgagagcagccgtgttaaagaaatcctcaatgacgagcgctacaagaaatttaagcagttcaccagcgtgttcggtgtgggcgtcaagaccgcggaaaagtggtaccgtatgggcctccgtacgctggaagaagtaaaggccagtaagttcctgaagctgaacaagatgcagaaggcgggcttcctgtactacgaggatctggcgagcggtgttacgaaagaagaaaaagatgccgttctggatatcgtgaaggaaacggtgtggactgttgatccggatgcgctggtggaaatcgtgggcggtttccgccgtcgcaaaccacagggccacgacgttgacctgctgatcacgattccgggccgtcctacggatccggagctgctccacaacgtggttgatctgctcaagaagcaaggtctgctgctgtacggggacatccgtgagcgtacgttcgtggaggggcaactgccaaatcctgcgccggaccagctggacggccatcagaagtgcttcgccattctcaagctgtaccgcccgaaggtggataacagtgcggttgggacgtcgaagaaagtcgacatggctgaggttaaggattggaaagcggttcgtgtggatctggtggtcgctccagatgagcagttcgcctatgcgaaactcggttggacgggcagcggcatgtttcgtcgcgatactcgtcgctacgcggaggaagagcgcgacatgctgctcgacaaccatggtctctacgacctgaaaaagggcatttttctgagtgcggacagcgaagaagagattttcggtcatctggacctggattatctggagccgtggtatcgcaacgcg

SEQ ID NO: 6612 - protein, 394 aa, synthetic construct
  REGION 1..394: note = Variant of terminal deoxynucleotidyl transferase
MHHHHHHGGSGHPEGNTPEKEVPSVIARHVSPYACQRKTTLNNYNKKITDALEIMAENYKFKENLQARLEARRAASVLKSLPFEVTSMKDIQGLPCITDDVRPVIEEIIEVGESSRVKEILNDERYKKFKQFTSVFGVGVKTAEKWYRMGLRTLEEVKASKFLKLNKMQKAGFLYYEDLASGVTKEEKDAVLDIVKETVWTVDPDALVEIVGGFRRRKPQGHDVDLLITIPGRPTDPELLHNVVDLLKKQGLLLYGDIRERTFVEGQLPNPAPDQLDGHQKCFAILKLYRPKVDNSAVGTSKKVDMAEVKDWKAVRVDLVVAPDEQFAYAKLGWTGSGMFRRDTRRYAEEERDMLLDNHGLYDLKKGIFLSADSEEEIFGHLDLDYLEPWYRNA

SEQ ID NO: 6613 - DNA, 1182 bp, synthetic construct
  misc_feature 1..1182: note = Variant of terminal deoxynucleotidyl transferase
  source 1..1182: mol_type = other DNA
atgcaccatcatcaccatcacgggggctccggccatccggaaggtaataccccggagaaggaggtgccgagcgttatcgcccgtcatgttagtccgtacgcgtgccagcgcaagaccacgctgaataactacaacaaaaagatcaccgacgcgctggagatcatggccgagaactacaagtttaaagagaacctgcaggcgcgcctggaggcccgtcgcgccgcgagtgtcctgaaaagcctgccgttcgaggttaccagcatgaaagacatccaaggtctgccgtgcattaccgacgacgtacgtcctgtgatcgaagagatcatcgaagtaggcgagagcagccgtgttaaagaaatcctcaatgacgagcgctacaagaaatttaagcagttcaccagcgtgttcggtgtgggcgtcaagaccgcggaaaagtggtaccgtatgggcctccgtacgctggaagaagtaaaggccagtaagttcctgaagctgaacaagatgcagaaggcgggcttcctgtactacgaggatctggcgagcggtgttacgaaagaagaaaaagatgccgttctggatatcgtgaaggaaacggtgtggactgttgatccggatgcgctggtggaaatcgtgggcggtttccgccgtcgcaaaccgcagggccacgacgttgacctgctgatcacgattccgggccgtcctacggatccggagctgctccacaacgtggttgatctgctcaagaagcaaggtctgctgctgtacggggacatccgtgagcgtacgttcgtggaggggcaactgccaaatcctgcgccggaccagctggacggccatcagaagtgcttcgccattctcaagctgtaccgcccgaaggtggataacagtgcggttgggacgtcgaagaaagtcgacatggctgaggttaaggattggaaagcggttcgtgtggatctggtggtcgctccagatgagcagttcgcctatgcgaaactcggttggacgggcagcggcatgtttcgtcgcgatactcgtcgctacgcggaggaagagcgcgacatgctgctcgacaaccatggtctctacgacctgaaaaagggcatttttctgagtgcgacgagcgaagaagagattttcggtcatctggacctggattatctggagccgtggtatcgcaacgcg

SEQ ID NO: 6614 - protein, 394 aa, synthetic construct
  REGION 1..394: note = Variant of terminal deoxynucleotidyl transferase
MHHHHHHGGSGHPEGNTPEKEVPSVIARHVSPYACQRKTTLNNYNKKITDALEIMAENYKFKENLQARLEARRAASVLKSLPFEVTSMKDIQGLPCITDDVRPVIEEIIEVGESSRVKEILNDERYKKFKQFTSVFGVGVKTAEKWYRMGLRTLEEVKASKFLKLNKMQKAGFLYYEDLASGVTKEEKDAVLDIVKETVWTVDPDALVEIVGGFRRRKPQGHDVDLLITIPGRPTDPELLHNVVDLLKKQGLLLYGDIRERTFVEGQLPNPAPDQLDGHQKCFAILKLYRPKVDNSAVGTSKKVDMAEVKDWKAVRVDLVVAPDEQFAYAKLGWTGSGMFRRDTRRYAEEERDMLLDNHGLYDLKKGIFLSATSEEEIFGHLDLDYLEPWYRNA

SEQ ID NO: 6615 - DNA, 1182 bp, synthetic construct
  misc_feature 1..1182: note = Variant of terminal deoxynucleotidyl transferase
  source 1..1182: mol_type = other DNA
atgcaccatcatcaccatcacgggggctccggccatccggaaggtaataccccggagaaggaggtgccgagcgttatcgcccgtcatgttagtccgtacgcgtgccagcgcaagaccacgctgaataactacaacaaaaagatcaccgacgcgctggagatcatggccgagaactacaagtttaaagagaacatgcaggcgcgcctggaggcccgtcgcgccgcgagtgtcctgaaaagcctgccgttcgaggttaccagcatgaaagacatccaaggtctgccgtgcattaccgacgacgtacgtcctgtgatcgaagagatcatcgaagtaggcgagagcagccgtgttaaagaaatcctcaatgacgagcgctacaaggcgtttaagcagttcaccagcgtgttcggtgtgggcgtcaagaccgcggaaaagtggtaccgtatgggcctgcgtacgctggaggaagtaaaggccagtaagttcctgaagctgaacaagatgcagaaggcgggcttcctgtactacgaggatctggcgagcggtgttacgaaagaagaaaaagatgccgttctggatatcgtgaaggaaacggtgtggactgttgatccggatgcgctggtgaccatcgtgggcggtttccgccgtcgcaaaccacagggccacgacgttgacctgctgctgacgattccgggccgtcctacggatccggagctgctccacaacgtggttgatctgctcaagaagcaaggtctgctgctgtacggggacatccgtgagcgtacgttcgtggaggggcaactgccaaatcctgcgccggaccagctggacggccatcagaagtgcttcgccattctcaagctgtaccgcccgaaggtggataacagtgcggttgggacgtcgaagaaagtcgacatggctgaggttaaggattggaaagcggttcgtgtggatctggtggtcgctccagatgagcagttcgcctatgcgaaactcggttggacgggcagcggcatgtttcgtcgcgatactcgtcgctacgcggaggaagagcgcgatatgctgctcgacaaccatggtctctacgacctgaaaaagggcatttttctgccggcgacgagcgaagaagagattttcggtcatctggacctggattatctggagccgtggtatcgcaacgcg

SEQ ID NO: 6616 - protein, 394 aa, synthetic construct
  REGION 1..394: note = Variant of terminal deoxynucleotidyl transferase
MHHHHHHGGSGHPEGNTPEKEVPSVIARHVSPYACQRKTTLNNYNKKITDALEIMAENYKFKENMQARLEARRAASVLKSLPFEVTSMKDIQGLPCITDDVRPVIEEIIEVGESSRVKEILNDERYKAFKQFTSVFGVGVKTAEKWYRMGLRTLEEVKASKFLKLNKMQKAGFLYYEDLASGVTKEEKDAVLDIVKETVWTVDPDALVTIVGGFRRRKPQGHDVDLLLTIPGRPTDPELLHNVVDLLKKQGLLLYGDIRERTFVEGQLPNPAPDQLDGHQKCFAILKLYRPKVDNSAVGTSKKVDMAEVKDWKAVRVDLVVAPDEQFAYAKLGWTGSGMFRRDTRRYAEEERDMLLDNHGLYDLKKGIFLPATSEEEIFGHLDLDYLEPWYRNA

SEQ ID NO: 6617 - DNA, 1182 bp, synthetic construct
  misc_feature 1..1182: note = Variant of terminal deoxynucleotidyl transferase
  source 1..1182: mol_type = other DNA
atgcaccatcatcaccatcacgggggctccggccatccggaaggtaataccccggagaaggaggtgccgagcgttatcgcccgtcatgttagtccgtacgcgtgccagcgcaagaccacgctgaataactacaacaaaaagatcaccgacgcgctggagatcatggccgagaactacaagtttaaagagaacctgcaggcgcgcctggaggcccgtcgcgccgcgagtgtcctgaaaagcctgccgttcgaggttaccagcatgaaagacatccaaggtctgccgtgcattaccgacgacgtacgtcctgtgatcgaagagatcatcgaagtaggcgagagcagccgtgttaaagaaatcctcaatgacgagcgctacaaggcgtttaagcagttcaccagcgtgttcggtgtgggcgtcaagaccgcggaaaagtggtaccgtatgggcctccgtacgctggaagaagtaaaggccagtaagttcctgaagctgaacaagatgcagaaggcgggcttcctgtactacgaggatctggcgagcggtgttacgaaagaagaaaaagatgccgttctggatatcgtgaaggaaacggtgtggactgttgatccggatgcgctggtgaccatcgtgggcggtttccgccgtcgcaaaccacagggccacgacgttgacctgctgctgacgattccgggccgtcctacggatccggagctgctccacaacgtggttgatctgctcaagaagcaaggtctgctgctgtacggggacatccgtgagcgtacgttcgtggaggggcaactgccaaatcctgcgccggaccagctggacggccatcagaagtgcttcgccattctcaagctgtaccgcccgaaggtggataacagtgcggttgggacgtcgaagaaagtcgacatggctgaggttaaggattggaaagcggttcgtgtggatctggtggtcgctccagatgagcagttcgcctatgcgaaactcggttggacgggcagcggcatgtttcgtcgcgatactcgtcgctacgcggaggaagagcgcgacatgctgctcgacaaccatggtctctacgacctgaaaaagggcatttttctgagtgcgacgagcgaagaagagattttcggtcatctggacctggattatctggagccgtggtatcgcaacgcg

SEQ ID NO: 6618 - protein, 394 aa, synthetic construct
  REGION 1..394: note = Variant of terminal deoxynucleotidyl transferase
MHHHHHHGGSGHPEGNTPEKEVPSVIARHVSPYACQRKTTLNNYNKKITDALEIMAENYKFKENLQARLEARRAASVLKSLPFEVTSMKDIQGLPCITDDVRPVIEEIIEVGESSRVKEILNDERYKAFKQFTSVFGVGVKTAEKWYRMGLRTLEEVKASKFLKLNKMQKAGFLYYEDLASGVTKEEKDAVLDIVKETVWTVDPDALVTIVGGFRRRKPQGHDVDLLLTIPGRPTDPELLHNVVDLLKKQGLLLYGDIRERTFVEGQLPNPAPDQLDGHQKCFAILKLYRPKVDNSAVGTSKKVDMAEVKDWKAVRVDLVVAPDEQFAYAKLGWTGSGMFRRDTRRYAEEERDMLLDNHGLYDLKKGIFLSATSEEEIFGHLDLDYLEPWYRNA

SEQ ID NO: 6619 - DNA, 1182 bp, synthetic construct
  misc_feature 1..1182: note = Variant of terminal deoxynucleotidyl transferase
  source 1..1182: mol_type = other DNA
atgcaccatcatcaccatcacgggggctccggccatccggaaggtaataccccggagaaggaggtgccgagcgttatcgcccgtcatgttagtccgtacgcgtgccagcgcaagaccacgctgaataactacaacaaaaagatcaccgacgcgctggagatcatggccgagaactacaagtttaaagagaacatgcaggcgcgcctggaggcccgtcgcgccgcgagtgtcctgaaaagcctgccgttcgaggttaccagcatgaaagacatccaaggtctgccgtgcattaccgacgacgtacgtcctgtgatcgaagagatcatcgaagtaggcgagagcagccgtgttaaagaaatcctcaatgacgagcgctacaaggcgtttaagcagttcaccagcgtgttcggtgtgggcgtcaagaccgcggaaaagtggtaccgtatgggcctgcgtacgctggaggaagtaaaggccagtaagttcctgaagctgaacaagatgcagaaggcgggcttcctgtactacgaggatctggcgagcggtgttacgaaagaagaaaaagatgccgttctggatatcgtgaaggaaacggtgtggactgttgatccggatgcgctggtggaaatcgtgggcggtttccgccgtcgcaaaacgcagggccacgacgttgacctgctgattacgattccgggccgtcctacggatccggagctgctccacaacgtggttgatctgctcaagaagcaaggtctgctgctgtacggggacatccgtgagcgtacgttcgtggaggggcaactgccaaatcctgcgccggaccagctggacggccatcagaagtgcttcgccattctcaagctgtaccgcccgaaggtggataacagtgcggttgggacgtcgaagaaagtcgacatggctgaggttaaggattggaaagcggttcgtgtggatctggtggtcgctccagatgagcagttcgcctatgcgaaactcggttggacgggcagcggcatgtttcgtcgcgatactcgtcgctacgcggaggaagagaaaaatatgctgctcgacaaccatggtctctacgacctgaaaaagggcatttttctgagtgcggatagcgaagaagagattttcggtcatctggacctggattatctggagccgtggtatcgcaacgcg

SEQ ID NO: 6620 - protein, 394 aa, synthetic construct
  REGION 1..394: note = Variant of terminal deoxynucleotidyl transferase
MHHHHHHGGSGHPEGNTPEKEVPSVIARHVSPYACQRKTTLNNYNKKITDALEIMAENYKFKENMQARLEARRAASVLKSLPFEVTSMKDIQGLPCITDDVRPVIEEIIEVGESSRVKEILNDERYKAFKQFTSVFGVGVKTAEKWYRMGLRTLEEVKASKFLKLNKMQKAGFLYYEDLASGVTKEEKDAVLDIVKETVWTVDPDALVEIVGGFRRRKTQGHDVDLLITIPGRPTDPELLHNVVDLLKKQGLLLYGDIRERTFVEGQLPNPAPDQLDGHQKCFAILKLYRPKVDNSAVGTSKKVDMAEVKDWKAVRVDLVVAPDEQFAYAKLGWTGSGMFRRDTRRYAEEEKNMLLDNHGLYDLKKGIFLSADSEEEIFGHLDLDYLEPWYRNA

SEQ ID NO: 6621 - DNA, 1182 bp, synthetic construct
  misc_feature 1..1182: note = Variant of terminal deoxynucleotidyl transferase
  source 1..1182: mol_type = other DNA
atgcaccatcatcaccatcacgggggctccggccatccggaaggtaataccccggagaaggaggtgccgagcgttatcgcccgtcatgttagtccgtacgcgtgccagcgcaagaccacgctgaataactacaacaaaaagatcaccgacgcgctggagatcatggccgagaactacaagtttaaagagaacatgcaggcgcgcctggaggcccgtcgcgccgcgagtgtcctgaaaagcctgccgttcgaggttaccagcatgaaagacatccaaggtctgccgtgcattaccgacgacgtacgtcctgtgatcgaagagatcatcgaagtaggcgagagcagccgtgttaaagaaatcctcaatgacgagcgctacaaggcgtttaagcagttcaccagcgtgttcggtgtgggcgtcaagaccgcggaaaagtggtaccgtatgggcaaacgtacgctggaggaagtaaaggccagtaagttcctgaagctgaacaagatgcagaaggcgggcttcctgtactacgaggatctggcgagcggtgttacgaaagaagaaaaagatgccgttctggatatcgtgaaggaaacggtgtggactgttgatccggatgcgctggtgaccatcgtgggcggtttccgccgtcgcaaaccacagggccacgacgttgacctgctgatcacgattccgggccgtcctacggatccggagctgctccacaacgtggttgatctgctcaagaagcaaggtctgctgctgtacggggacatccgtgagcgtacgttcgtggaggggcaactgccaaatcctgcgccggaccagctggacggccatcagaagtgcttcgccattctcaagctgtaccgcccgaaggtggataacagtgcggttgggacgtcgaagaaagtcgacatggctgaggttaaggattggaaagcggttcgtgtggatctggtggtcgctccagatgagcagttcgcctatgcgaaactcggttggacgggcagcggcatgtttcgtcgcgatactcgtcgctacgcggaggaagagcgcgatatgctgctcgacaaccatggtctctacgacctgaaaaagggcatttttctgagtgcggacagcgaagaagagattttcggtcatctggacctggattatctggagccgtggtatcgcaacgcg

SEQ ID NO: 6622 - protein, 394 aa, synthetic construct
  REGION 1..394: note = Variant of terminal deoxynucleotidyl transferase
MHHHHHHGGSGHPEGNTPEKEVPSVIARHVSPYACQRKTTLNNYNKKITDALEIMAENYKFKENMQARLEARRAASVLKSLPFEVTSMKDIQGLPCITDDVRPVIEEIIEVGESSRVKEILNDERYKAFKQFTSVFGVGVKTAEKWYRMGKRTLEEVKASKFLKLNKMQKAGFLYYEDLASGVTKEEKDAVLDIVKETVWTVDPDALVTIVGGFRRRKPQGHDVDLLITIPGRPTDPELLHNVVDLLKKQGLLLYGDIRERTFVEGQLPNPAPDQLDGHQKCFAILKLYRPKVDNSAVGTSKKVDMAEVKDWKAVRVDLVVAPDEQFAYAKLGWTGSGMFRRDTRRYAEEERDMLLDNHGLYDLKKGIFLSADSEEEIFGHLDLDYLEPWYRNA

SEQ ID NO: 6623 - DNA, 1182 bp, synthetic construct
  misc_feature 1..1182: note = Variant of terminal deoxynucleotidyl transferase
  source 1..1182: mol_type = other DNA
atgcaccatcatcaccatcacgggggctccggccatccggaaggtaataccccggagaaggaggtgccgagcgttatcgcccgtcatgttagtccgtacgcgtgccagcgcaagaccacgctgaataactacaacaaaaagatcaccgacgcgctggagatcatggccgagaactacaagtttaaagagaacctgcaggcgcgcctggaggcccgtcgcgccgcgagtgtcctgaaaagcctgccgttcgaggttaccagcatgaaagacatccaaggtctgccgtgcattaccgacgacgtacgtcctgtgatcgaagagatcatcgaagtaggcgagagcagccgtgttaaagaaatcctcaatgacgagcgctacaaggcgtttaagcagttcaccagcgtgttcggtgtgggcgtcaagaccgcggaaaagtggtaccgtatgggcaaacgtacgctggaggaagtaaaggccagtaagttcctgaagctgaacaagatgcagaaggcgggcttcctgtactacgaggatctggcgagcggtgttacgaaagaagaaaaagatgccgttctggatatcgtgaaggaaacggtgtggactgttgatccggatgcgctggtgaccatcgtgggcggtttccgccgtcgcaaaccacagggccacgacgttgacctgctgctgacgattccgggccgtcctacggatccggagctgctccacaacgtggttgatctgctcaagaagcaaggtctgctgctgtacggggacatccgtgagcgtacgttcgtggaggggcaactgccaaatcctgcgccggaccagctggacggccatcagaagtgcttcgccattctcaagctgtaccgcccgaaggtggataacagtgcggttgggacgtcgaagaaagtcgacatggctgaggttaaggattggaaagcggttcgtgtggatctggtggtcgctccagatgagcagttcgcctatgcgaaactcggttggacgggcagcggcatgtttcgtcgcgatactcgtcgctacgcggaggaagagcgcgatatgctgctcgacaaccatggtctctacgacctgaaaaagggcatttttctgagtgcgacgagcgaagaagagattttcggtcatctggacctggattatctggagccgtggtatcgcaacgcg

SEQ ID NO: 6624 - protein, 394 aa, synthetic construct
  REGION 1..394: note = Variant of terminal deoxynucleotidyl transferase
MHHHHHHGGSGHPEGNTPEKEVPSVIARHVSPYACQRKTTLNNYNKKITDALEIMAENYKFKENLQARLEARRAASVLKSLPFEVTSMKDIQGLPCITDDVRPVIEEIIEVGESSRVKEILNDERYKAFKQFTSVFGVGVKTAEKWYRMGKRTLEEVKASKFLKLNKMQKAGFLYYEDLASGVTKEEKDAVLDIVKETVWTVDPDALVTIVGGFRRRKPQGHDVDLLLTIPGRPTDPELLHNVVDLLKKQGLLLYGDIRERTFVEGQLPNPAPDQLDGHQKCFAILKLYRPKVDNSAVGTSKKVDMAEVKDWKAVRVDLVVAPDEQFAYAKLGWTGSGMFRRDTRRYAEEERDMLLDNHGLYDLKKGIFLSATSEEEIFGHLDLDYLEPWYRNA

SEQ ID NO: 6625 - DNA, 1182 bp, synthetic construct
  misc_feature 1..1182: note = Variant of terminal deoxynucleotidyl transferase
  source 1..1182: mol_type = other DNA
atgcaccatcatcaccatcacgggggctccggccatccggaaggtaataccccggagaaggaggtgccgagcgttatcgcccgtcatgttagtccgtacgcgtgccagcgcaagaccacgctgaataactacaacaaaaagatcaccgacgcgctggagatcatggccgagaactacaagtttaaagagaacctgcaggcgcgcctggaggcccgtcgcgccgcgagtgtcctgaaaagcctgccgttcgaggttaccagcatgaaagacatccaaggtctgccgtgcattaccgacgacgtacgtcctgtgatcgaagagatcatcgaagtaggcgagagcagccgtgttaaagaaatcctcaatgacgagcgctacaaggcgtttaagcagttcaccagcgtgttcggtgtgggcgtcaagaccgcggaaaagtggtaccgtatgggcctgcgtacgctggaggaagtaaaggccagtaagttcctgaagctgaacaagatgcagaaggcgggcttcctgtactacgaggatctggcgagcggtgttacgaaagaagaaaaagatgccgttctggatatcgtgaaggaaacggtgtggactgttgatccggatgcgctggtgaccatcgtgggcggtttccgccgtcgcaaaccacagggccacgacgttgacctgctgatcacgattccgggccgtcctacggatccggagctgctccacaacgtggttgatctgctcaagaagcaaggtctgctgctgtacggggacatccgtgagcgtacgttcgtggaggggcaactgccaaatcctgcgccggaccagctggacggccatcagaagtgcttcgccattctcaagctgtaccgcccgaaggtggataacagtgcggttgggacgtcgaagaaagtcgacatggctgaggttaaggattggaaagcggttcgtgtggatctggtggtcgctccagatgagcagttcgcctatgcgaaactcggttggacgggcagcggcatgtttcgtcgcgatactcgtcgctacgcggaggaagagcgcgacatgctgctcgacaaccatggtctctacgacctgaaaaagggcatttttctgccggcggatagcgaagaagagattttcggtcatctggacctggattatctggagccgtggtatcgcaacgcg

SEQ ID NO: 6626 - protein, 394 aa, synthetic construct
  REGION 1..394: note = Variant of terminal deoxynucleotidyl transferase
MHHHHHHGGSGHPEGNTPEKEVPSVIARHVSPYACQRKTTLNNYNKKITDALEIMAENYKFKENLQARLEARRAASVLKSLPFEVTSMKDIQGLPCITDDVRPVIEEIIEVGESSRVKEILNDERYKAFKQFTSVFGVGVKTAEKWYRMGLRTLEEVKASKFLKLNKMQKAGFLYYEDLASGVTKEEKDAVLDIVKETVWTVDPDALVTIVGGFRRRKPQGHDVDLLITIPGRPTDPELLHNVVDLLKKQGLLLYGDIRERTFVEGQLPNPAPDQLDGHQKCFAILKLYRPKVDNSAVGTSKKVDMAEVKDWKAVRVDLVVAPDEQFAYAKLGWTGSGMFRRDTRRYAEEERDMLLDNHGLYDLKKGIFLPADSEEEIFGHLDLDYLEPWYRNA

SEQ ID NO: 6627 - DNA, 1182 bp, synthetic construct
  misc_feature 1..1182: note = Variant of terminal deoxynucleotidyl transferase
  source 1..1182: mol_type = other DNA
atgcaccatcatcaccatcacgggggctccggccatccggaaggtaataccccggagaaggaggtgccgagcgttatcgcccgtcatgttagtccgtacgcgtgccagcgcaagaccacgctgaataactacaacaaaaagatcaccgacgcgctggagatcatggccgagaactacaagtttaaagagaacctgcaggcgcgcctggaggcccgtcgcgccgcgagtgtcctgaaaagcctgccgttcgaggttaccagcatgaaagacatccaaggtctgccgtgcattaccgacgacgtacgtcctgtgatcgaagagatcatcgaagtaggcgagagcagccgtgttaaagaaatcctcaatgacgagcgctacaaggcgtttaagcagttcaccagcgtgttcggtgtgggcgtcaagaccgcggaaaagtggtaccgtatgggcctgcgtacgctggaggaagtaaaggccagtaagttcctgaagctgaacaagatgcagaaggcgggcttcctgtactacgaggatctggcgagcggtgttacgaaagaagaaaaagatgccgttctggatatcgtgaaggaaacggtgtggactgttgatccggatgcgctggtgaccatcgtgggcggtttccgccgtcgcaaaccacagggccacgacgttgacctgctgatcacgattccgggccgtcctacggatccggagctgctccacaacgtggttgatctgctcaagaagcaaggtctgctgctgtacggggacatccgtgagcgtacgttcgtggaggggcaactgccaaatcctgcgccggaccagctggacggccatcagaagtgcttcgccattctcaagctgtaccgcccgaaggtggataacagtgcggttgggacgtcgaagaaagtcgacatggctgaggttaaggattggaaagcggttcgtgtggatctggtggtcgctccagatgagcagttcgcctatgcgaaactcggttggacgggcagcggcatgtttcgtcgcgatactcgtcgctacgcggaggaagagaaaaatatgctgctcgacaaccatggtctctacgacctgaaaaagggcatttttctgccggcggatagcgaagaagagattttcggtcatctggacctggattatctggagccgtggtatcgcaacgcg

SEQ ID NO: 6628 - protein, 394 aa, synthetic construct
  REGION 1..394: note = Variant of terminal deoxynucleotidyl transferase
MHHHHHHGGSGHPEGNTPEKEVPSVIARHVSPYACQRKTTLNNYNKKITDALEIMAENYKFKENLQARLEARRAASVLKSLPFEVTSMKDIQGLPCITDDVRPVIEEIIEVGESSRVKEILNDERYKAFKQFTSVFGVGVKTAEKWYRMGLRTLEEVKASKFLKLNKMQKAGFLYYEDLASGVTKEEKDAVLDIVKETVWTVDPDALVTIVGGFRRRKPQGHDVDLLITIPGRPTDPELLHNVVDLLKKQGLLLYGDIRERTFVEGQLPNPAPDQLDGHQKCFAILKLYRPKVDNSAVGTSKKVDMAEVKDWKAVRVDLVVAPDEQFAYAKLGWTGSGMFRRDTRRYAEEEKNMLLDNHGLYDLKKGIFLPADSEEEIFGHLDLDYLEPWYRNA

SEQ ID NO: 6629 - DNA, 1182 bp, synthetic construct
  misc_feature 1..1182: note = Variant of terminal deoxynucleotidyl transferase
  source 1..1182: mol_type = other DNA
atgcaccatcatcaccatcacgggggctccggccatccggaaggtaataccccggagaaggaggtgccgagcgttatcgcccgtcatgttagtccgtacgcgtgccagcgcaagaccacgctgaataactacaacaaaaagatcaccgacgcgctggagatcatggccgagaactacaagtttaaagagaacctgcaggcgcgcctggaggcccgtcgcgccgcgagtgtcctgaaaagcctgccgttcgaggttaccagcatgaaagacatccaaggtctgccgtgcattaccgacgacgtacgtcctgtgatcgaagagatcatcgaagtaggcgagagcagccgtgttaaagaaatcctcaatgacgagcgctacaaggcgtttaagcagttcaccagcgtgttcggtgtgggcgtcaagaccgcggaaaagtggtaccgtatgggcctccgtacgctggaagaagtaaaggcaagtaagttcctgaagctgaacaagatgcagaaggcgggcttcctgtactacgaggatctggcgagcggtgttacgaaagaagaaaaagatgccgttctggatatcgtgaaggaaacggtgtggactgttgatccggatgcgctggtgaccatcgtgggcggtttccgccgtcgcaaaacgcagggccacgacgttgacctgctgctgacgattccgggccgtcctacggatccggagctgctccacaacgtggttgatctgctcaagaagcaaggtctgctgctgtacggggacatccgtgagcgtacgttcgtggaggggcaactgccaaatcctgcgccggaccagctggacggccatcagaagtgcttcgccattctcaagctgtaccgcccgaaggtggataacagtgcggttgggacgtcgaagaaagtcgacatggctgaggttaaggattggaaagcggttcgtgtggatctggtggtcgctccagatgagcagttcgcctatgcgaaactcggttggacgggcagcggcatgtttcgtcgcgatactcgtcgctacgcggaggaagagcgcgacatgctgctcgacaaccatggtctctacgacctgaaaaagggcatttttctgagtgcggatagcgaagaagagattttcggtcatctggacctggattatctggagccgtggtatcgcaacgcg

SEQ ID NO: 6630 - protein, 394 aa, synthetic construct
  REGION 1..394: note = Variant of terminal deoxynucleotidyl transferase
MHHHHHHGGSGHPEGNTPEKEVPSVIARHVSPYACQRKTTLNNYNKKITDALEIMAENYKFKENLQARLEARRAASVLKSLPFEVTSMKDIQGLPCITDDVRPVIEEIIEVGESSRVKEILNDERYKAFKQFTSVFGVGVKTAEKWYRMGLRTLEEVKASKFLKLNKMQKAGFLYYEDLASGVTKEEKDAVLDIVKETVWTVDPDALVTIVGGFRRRKTQGHDVDLLLTIPGRPTDPELLHNVVDLLKKQGLLLYGDIRERTFVEGQLPNPAPDQLDGHQKCFAILKLYRPKVDNSAVGTSKKVDMAEVKDWKAVRVDLVVAPDEQFAYAKLGWTGSGMFRRDTRRYAEEERDMLLDNHGLYDLKKGIFLSADSEEEIFGHLDLDYLEPWYRNA

SEQ ID NO: 6631 - DNA, 1182 bp, synthetic construct
  misc_feature 1..1182: note = Variant of terminal deoxynucleotidyl transferase
  source 1..1182: mol_type = other DNA
atgcaccatcatcaccatcacgggggctccggccatccggaaggtaataccccggagaaggaggtgccgagcgttatcgcccgtcatgttagtccgtacgcgtgccagcgcaagaccacgctgaataactacaacaaaaagatcaccgacgcgctggagatcatggccgagaactacaagtttaaagagaacctgcaggcgcgcctggaggcccgtcgcgccgcgagtgtcctgaaaagcctgccgttcgaggttaccagcatgaaagacatccaaggtctgccgtgcattaccgacgacgtacgtcctgtgatcgaagagatcatcgaagtaggcgagagcagccgtgttaaagaaatcctcaatgacgagcgctacaagaaatttaagcagttcaccagcgtgttcggtgtgggcgtcaagaccgcggaaaagtggtaccgtatgggcctccgtacgctggaagaagtaaagcgtagtaagttcctgaagctgaacaagatgcagaaggcgggcttcctgtactacgaggatctggcgagcggtgttacgaaagaagaaaaagatgccgttctggatatcgtgaaggaaacggtgtggactgttgatccggatgcgctggtggaaatcgtgggcggtttccgccgtcgcaaaccacagggccacgacgttgacctgctgattacgattccgggccgtcctacggatccggagctgctccacaacgtggttgatctgctcaagaagcaaggtctgctgctgtacggggacatccgtgagcgtacgttcgtggaggggcaactgccaaatcctgcgccggaccagctggacggccatcagaagtgcttcgccattctcaagctgtaccgcccgaaggtggataacagtgcggttgggacgtcgaagaaagtcgacatggctgaggttaaggattggaaagcggttcgtgtggatctggtggtcgctccagatgagcagttcgcctatgcgaaactcggttggacgggcagcggcatgtttcgtcgcgatactcgtcgctacgcggaggaagagaaaaatatgctgctcgacaaccatggtctctacgacctgaaaaagggcatttttctgagtgcggacagcgaagaagagattttcggtcatctggacctggattatctggagccgtggtatcgcaacgcg

SEQ ID NO: 6632 - protein, 394 aa, synthetic construct
  REGION 1..394: note = Variant of terminal deoxynucleotidyl transferase
MHHHHHHGGSGHPEGNTPEKEVPSVIARHVSPYACQRKTTLNNYNKKITDALEIMAENYKFKENLQARLEARRAASVLKSLPFEVTSMKDIQGLPCITDDVRPVIEEIIEVGESSRVKEILNDERYKKFKQFTSVFGVGVKTAEKWYRMGLRTLEEVKRSKFLKLNKMQKAGFLYYEDLASGVTKEEKDAVLDIVKETVWTVDPDALVEIVGGFRRRKPQGHDVDLLITIPGRPTDPELLHNVVDLLKKQGLLLYGDIRERTFVEGQLPNPAPDQLDGHQKCFAILKLYRPKVDNSAVGTSKKVDMAEVKDWKAVRVDLVVAPDEQFAYAKLGWTGSGMFRRDTRRYAEEEKNMLLDNHGLYDLKKGIFLSADSEEEIFGHLDLDYLEPWYRNA

SEQ ID NO: 6633 - DNA, 1182 bp, synthetic construct
  misc_feature 1..1182: note = Variant of terminal deoxynucleotidyl transferase
  source 1..1182: mol_type = other DNA
atgcaccatcatcaccatcacgggggctccggccatccggaaggtaataccccggagaaggaggtgccgagcgttatcgcccgtcatgttagtccgtacgcgtgccagcgcaagaccacgctgaataactacaacaaaaagatcaccgacgcgctggagatcatggccgagaactacaagtttaaagagaacctgcaggcgcgcctggaggcccgtcgcgccgcgagtgtcctgaaaagcctgccgttcgaggttaccagcatgaaagacatccaaggtctgccgtgcattaccgacgacgtacgtcctgtgatcgaagagatcatcgaagtaggcgagagcagccgtgttaaagaaatcctcaatgacgagcgctacaagaaatttaagcagttcaccagcgtgttcggtgtgggcgtcaagaccgcggaaaagtggtaccgtatgggcctgcgtacgctggaggaagtaaaggccagtaagttcctgaagctgaacaagatgcagaaggcgggcttcctgtactacgaggatctggcgagcggtgttacgaaagaagaaaaagatgccgttctggatatcgtgaaggaaacggtgtggactgttgatccggatgcgctggtggaaatcgtgggcggtttccgccgtcgcaaaacgcagggccacgacgttgacctgctgattacgattccgggccgtcctacggatccggagctgctccacaacgtggttgatctgctcaagaagcaaggtctgctgctgtacggggacatccgtgagcgtacgttcgtggaggggcaactgccaaatcctgcgccggaccagctggacggccatcagaagtgcttcgccattctcaagctgtaccgcccgaaggtggataacagtgcggttgggacgtcgaagaaagtcgacatggctgaggttaaggattggaaagcggttcgtgtggatctggtggtcgctccagatgagcagttcgcctatgcgaaactcggttggacgggcagcggcatgtttcgtcgcgatactcgtcgctacgcggaggaagagcgcgatatgctgctcgacaaccatggtctctacgacctgaaaaagggcatttttctgagtgcggatagcgaagaagagattttcggtcatctggacctggattatctggagccgtggtatcgcaacgcg

SEQ ID NO: 6634 - protein, 394 aa, synthetic construct
  REGION 1..394: note = Variant of terminal deoxynucleotidyl transferase
MHHHHHHGGSGHPEGNTPEKEVPSVIARHVSPYACQRKTTLNNYNKKITDALEIMAENYKFKENLQARLEARRAASVLKSLPFEVTSMKDIQGLPCITDDVRPVIEEIIEVGESSRVKEILNDERYKKFKQFTSVFGVGVKTAEKWYRMGLRTLEEVKASKFLKLNKMQKAGFLYYEDLASGVTKEEKDAVLDIVKETVWTVDPDALVEIVGGFRRRKTQGHDVDLLITIPGRPTDPELLHNVVDLLKKQGLLLYGDIRERTFVEGQLPNPAPDQLDGHQKCFAILKLYRPKVDNSAVGTSKKVDMAEVKDWKAVRVDLVVAPDEQFAYAKLGWTGSGMFRRDTRRYAEEERDMLLDNHGLYDLKKGIFLSADSEEEIFGHLDLDYLEPWYRNA

SEQ ID NO: 6635 - DNA, 1182 bp, synthetic construct
  misc_feature 1..1182: note = Variant of terminal deoxynucleotidyl transferase
  source 1..1182: mol_type = other DNA
atgcaccatcatcaccatcacgggggctccggccatccggaaggtaataccccggagaaggaggtgccgagcgttatcgcccgtcatgttagtccgtacgcgtgccagcgcaagaccacgctgaataactacaacaaaaagatcaccgacgcgctggagatcatggccgagaactacaagtttaaagagaacctgcaggcgcgcctggaggcccgtcgcgccgcgagtgtcctgaaaagcctgccgttcgaggttaccagcatgaaagacatccaaggtctgccgtgcattaccgacgacgtacgtcctgtgatcgaagagatcatcgaagtaggcgagagcagccgtgttaaagaaatcctcaatgacgagcgctacaaggcgtttaagcagttcaccagcgtgttcggtgtgggcgtcaagaccgcggaaaagtggtaccgtatgggcctgcgtacgctgaaggaagtaaaggccagtaagttcctgaagctgaacaagatgcagaaggcgggcttcctgtactacgaggatctggcgagcggtgttacgaaagaagaaaaagatgccgttctggatatcgtgaaggaaacggtgtggactgttgatccggatgcgctggtgaccatcgtgggcggtttccgccgtcgcaaaccgcagggccacgacgttgacctgctgattacgattccgggccgtcctacggatccggagctgctccacaacgtggttgatctgctcaagaagcaaggtctgctgctgtacggggacatccgtgagcgtacgttcgtggaggggcaactgccaaatcctgcgccggaccagctggacggccatcagaagtgcttcgccattctcaagctgtaccgcccgaaggtggataacagtgcggttgggacgtcgaagaaagtcgacatggctgaggttaaggattggaaagcggttcgtgtggatctggtggtcgctccagatgagcagttcgcctatgcgaaactcggttggacgggcagcggcatgtttcgtcgcgatactcgtcgctacgcggaggaagagcgcgatatgctgctcgacaaccatggtctctacgacctgaaaaagggcatttttctgagtgcggatagcgaagaagagattttcggtcatctggacctggattatctggagccgtggtatcgcaacgcg

SEQ ID NO: 6636 - protein, 394 aa, synthetic construct
  REGION 1..394: note = Variant of terminal deoxynucleotidyl transferase
MHHHHHHGGSGHPEGNTPEKEVPSVIARHVSPYACQRKTTLNNYNKKITDALEIMAENYKFKENLQARLEARRAASVLKSLPFEVTSMKDIQGLPCITDDVRPVIEEIIEVGESSRVKEILNDERYKAFKQFTSVFGVGVKTAEKWYRMGLRTLKEVKASKFLKLNKMQKAGFLYYEDLASGVTKEEKDAVLDIVKETVWTVDPDALVTIVGGFRRRKPQGHDVDLLITIPGRPTDPELLHNVVDLLKKQGLLLYGDIRERTFVEGQLPNPAPDQLDGHQKCFAILKLYRPKVDNSAVGTSKKVDMAEVKDWKAVRVDLVVAPDEQFAYAKLGWTGSGMFRRDTRRYAEEERDMLLDNHGLYDLKKGIFLSADSEEEIFGHLDLDYLEPWYRNA

SEQ ID NO: 6637 - DNA, 1182 bp, synthetic construct
  misc_feature 1..1182: note = Variant of terminal deoxynucleotidyl transferase
  source 1..1182: mol_type = other DNA
atgcaccatcatcaccatcacgggggctccggccatccggaaggtaataccccggagaaggaggtgccgagcgttatcgcccgtcatgttagtccgtacgcgtgccagcgcaagaccacgctgaataactacaacaaaaagatcaccgacgcgctggagatcatggccgagaactacaagtttaaagagaacctgcaggcgcgcctggaggcccgtcgcgccgcgagtgtcctgaaaagcctgccgttcgaggttaccagcatgaaagacatccaaggtctgccgtgcattaccgacgacgtacgtcctgtgatcgaagagatcatcgaagtaggcgagagcagccgtgttaaagaaatcctcaatgacgagcgctacaagaaatttaagcagttcaccagcgtgttcggtgtgggcgtcaagaccgcggaaaagtggtaccgtatgggcctgcgtacgctggaggaagtaaaggccagtaagttcctgaagctgaacaagatgcagaaggcgggcttcctgtactacgaggatctggcgagcggtgttacgaaagaagaaaaagatgccgttctggatatcgtgaaggaaacggtgtggactgttgatccggatgcgctggtgaccatcgtgggcggtttccgccgtcgcaaaccacagggccacgacgttgacctgctgattacgattccgggccgtcctacggatccggagctgctccacaacgtggttgatctgctcaagaagcaaggtctgctgctgtacggggacatccgtgagcgtacgttcgtggaggggcaactgccaaatcctgcgccggaccagctggacggccatcagaagtgcttcgccattctcaagctgtaccgcccgaaggtggataacagtgcggttgggacgtcgaagaaagtcgacatggctgaggttaaggattggaaagcggttcgtgtggatctggtggtcgctccagatgagcagttcgcctatgcgaaactcggttggacgggcagcggcatgtttcgtcgcgatactcgtcgctacgcggaggaagagaaaaatatgctgctcgacaaccatggtctctacgacctgaaaaagggcatttttctgagtgcggatagcgaagaagagattttcggtcatctggacctggattatctggagccgtggtatcgcaacgcg

SEQ ID NO: 6638 - protein, 394 aa, synthetic construct
  REGION 1..394: note = Variant of terminal deoxynucleotidyl transferase
MHHHHHHGGSGHPEGNTPEKEVPSVIARHVSPYACQRKTTLNNYNKKITDALEIMAENYKFKENLQARLEARRAASVLKSLPFEVTSMKDIQGLPCITDDVRPVIEEIIEVGESSRVKEILNDERYKKFKQFTSVFGVGVKTAEKWYRMGLRTLEEVKASKFLKLNKMQKAGFLYYEDLASGVTKEEKDAVLDIVKETVWTVDPDALVTIVGGFRRRKPQGHDVDLLITIPGRPTDPELLHNVVDLLKKQGLLLYGDIRERTFVEGQLPNPAPDQLDGHQKCFAILKLYRPKVDNSAVGTSKKVDMAEVKDWKAVRVDLVVAPDEQFAYAKLGWTGSGMFRRDTRRYAEEEKNMLLDNHGLYDLKKGIFLSADSEEEIFGHLDLDYLEPWYRNA

SEQ ID NO: 6639 - DNA, 1182 bp, synthetic construct
  misc_feature 1..1182: note = Variant of terminal deoxynucleotidyl transferase
  source 1..1182: mol_type = other DNA
atgcaccatcatcaccatcacgggggctccggccatccggaaggtaataccccggagaaggaggtgccgagcgttatcgcccgtcatgttagtccgtacgcgtgccagcgcaagaccacgctgaataactacaacaaaaagatcaccgacgcgctggagatcatggccgagaactacaagtttaaagagaacctgcaggcgcgcctggaggcccgtcgcgccgcgagtgtcctgaaaagcctgccgttcgaggttaccagcatgaaagacatccaaggtctgccgtgcattaccgacgacgtacgtcctgtgatcgaagagatcatcgaagtaggcgagagcagccgtgttaaagaaatcctcaatgacgagcgctacaagaaatttaagcagttcaccagcgtgttcggtgtgggcgtcaagaccgcggaaaagtggtaccgtatgggcctccgtacgctggaagaagtaaaggcaagtaagttcctgaagctgaacaagatgcagaaggcgggcttcctgtactacgaggatctggcgagcggtgttacgaaagaagaaaaagatgccgttctggatatcgtgaaggaaacggtgtggactgttgatccggatgcgctggtggaaatcgtgggcggtttccgccgtcgcaaaccacagggccacgacgttgacctgctgattacgattccgggccgtcctacggatccggagctgctccacaacgtggttgatctgctcaagaagcaaggtctgctgctgtacggggacatccgtgagcgtacgttcgtggaggggcaactgccaaatcctgcgccggaccagctggacggccatcagaagtgcttcgccattctcaagctgtaccgcccgaaggtggataacagtgcggttgggacgtcgaagaaagtcgacatggctgaggttaaggattggaaagcggttcgtgtggatctggtggtcgctccagatgagcagttcgcctatgcgaaactcggttggacgggcagcggcatgtttcgtcgcgatactcgtcgctacgcggaggaagagcgcgacatgctgctcgacaaccatggtctctacgacctgaaaaagggcatttttctgagtgcgacgagcgaagaagagattttcggtcatctggacctggattatctggagccgtggtatcgcaacgcg

SEQ ID NO: 6640 - protein, 394 aa, synthetic construct; identical to SEQ ID NO: 6614
  REGION 1..394: note = Variant of terminal deoxynucleotidyl transferase

SEQ ID NO: 6641 - DNA, 1182 bp, synthetic construct
  misc_feature 1..1182: note = Variant of terminal deoxynucleotidyl transferase
  source 1..1182: mol_type = other DNA
atgcaccatcatcaccatcacgggggctccggccatccggaaggtaataccccggagaaggaggtgccgagcgttatcgcccgtcatgttagtccgtacgcgtgccagcgcaagaccacgctgaataactacaacaaaaagatcaccgacgcgctggagatcatggccgagaactacaagtttaaagagaacctgcaggcgcgcctggaggcccgtcgcgccgcgagtgtcctgaaaagcctgccgttcgaggttaccagcatgaaagacatccaaggtctgccgtgcattaccgacgacgtacgtcctgtgatcgaagagatcatcgaagtaggcgagagcagccgtgttaaagaaatcctcaatgacgagcgctacaaggcgtttaagcagttcaccagcgtgttcggtgtgggcgtcaagaccgcggaaaagtggtaccgtatgggcctccgtacgctggaagaagtaaaggccagtaagttcctgaagctgaacaagatgcagaaggcgggcttcctgtactacgaggatctggcgagcggtgttacgaaagaagaaaaagatgccgttctggatatcgtgaaggaaacggtgtggactgttgatccggatgcgctggtgaccatcgtgggcggtttccgccgtcgcaaaacgcagggccacgacgttgacctgctgatcacgattccgggccgtcctacggatccggagctgctccacaacgtggttgatctgctcaagaagcaaggtctgctgctgtacggggacatccgtgagcgtacgttcgtggaggggcaactgccaaatcctgcgccggaccagctggacggccatcagaagtgcttcgccattctcaagctgtaccgcccgaaggtggataacagtgcggttgggacgtcgaagaaagtcgacatggctgaggttaaggattggaaagcggttcgtgtggatctggtggtcgctccagatgagcagttcgcctatgcgaaactcggttggacgggcagcggcatgtttcgtcgcgatactcgtcgctacgcggaggaagagaaaaatatgctgctcgacaaccatggtctctacgacctgaaaaagggcatttttctgagtgcgacgagcgaagaagagattttcggtcatctggacctggattatctggagccgtggtatcgcaacgcg

SEQ ID NO: 6642 - protein, 394 aa, synthetic construct
  REGION 1..394: note = Variant of terminal deoxynucleotidyl transferase
MHHHHHHGGSGHPEGNTPEKEVPSVIARHVSPYACQRKTTLNNYNKKITDALEIMAENYKFKENLQARLEARRAASVLKSLPFEVTSMKDIQGLPCITDDVRPVIEEIIEVGESSRVKEILNDERYKAFKQFTSVFGVGVKTAEKWYRMGLRTLEEVKASKFLKLNKMQKAGFLYYEDLASGVTKEEKDAVLDIVKETVWTVDPDALVTIVGGFRRRKTQGHDVDLLITIPGRPTDPELLHNVVDLLKKQGLLLYGDIRERTFVEGQLPNPAPDQLDGHQKCFAILKLYRPKVDNSAVGTSKKVDMAEVKDWKAVRVDLVVAPDEQFAYAKLGWTGSGMFRRDTRRYAEEEKNMLLDNHGLYDLKKGIFLSATSEEEIFGHLDLDYLEPWYRNA

SEQ ID NO: 6643 - DNA, 1182 bp, synthetic construct; identical to SEQ ID NO: 6589
  misc_feature 1..1182: note = Variant of terminal deoxynucleotidyl transferase
  source 1..1182: mol_type = other DNA

SEQ ID NO: 6644 - protein, 394 aa, synthetic construct; identical to SEQ ID NO: 6590
  REGION 1..394: note = Variant of terminal deoxynucleotidyl transferase

SEQ ID NO: 6645 - DNA, 1182 bp, synthetic construct
  misc_feature 1..1182: note = Variant of terminal deoxynucleotidyl transferase
  source 1..1182: mol_type = other DNA
atgcaccatcatcaccatcacgggggctccggccatccggaaggtaataccccggagaaggaggtgccgagcgttatcgcccgtcatgttagtccgtacgcgtgccagcgcaagaccacgctgaataactacaacaaaaagatcaccgacgcgctggagatcatggccgagaactacaagtttaaagagaacctgcaggcgcgcctggaggcccgtcgcgccgcgagtgtcctgaaaagcctgccgttcgaggttaccagcatgaaagacatccaaggtctgccgtgcattaccgacgacgtacgtcctgtgatcgaagagatcatcgaagtaggcgagagcagccgtgttaaagaaatcctcaatgacgagcgctacaaggcctttaagcagttcaccagcgtgttcggtgtgggcgtcaagaccgcggaaaagtggtaccgtatgggcctccgtacgctggaagaagtaaaggccagtaagttcctgaagctgaacaagatgcagaaggcgggcttcctgtactacgaggatctggcgagcggtgttacgaaagaagaaaaagatgccgttctggatatcgtgaaggaaacggtgtggactgttgatccggatgcgctggtggaaatcgtgggcggtttccgccgtcgcaaaccacagggccacgacgttgacctgctgatcacgattccgggccgtcctacggatccggagctgctccacaacgtggttgatctgctcaagaagcaaggtctgctgctgtacggggacatccgtgagcgtacgttcgtggaggggcaactgccaaatcctgcgccggaccagctggacggccatcagaagtgcttcgccattctcaagctgtaccgcccgaaggtggataacagtgcggttgggacgtcgaagaaagtcgacatggctgaggttaaggattggaaagcggttcgtgtggatctggtggtcgctccagatgagcagttcgcctatgcgaaactcggttggacgggcagcggcatgtttcgtcgcgatactcgtcgctacgcggaggaagagcgcgatatgctgctcgacaaccatggtctctacgacctgaaaaagggcatttttctgccggcgacgagcgaagaagagattttcggtcatctggacctggattatctggagccgtggtatcgcaacgcg

SEQ ID NO: 6646 - protein, 394 aa, synthetic construct; identical to SEQ ID NO: 6574
  REGION 1..394: note = Variant of terminal deoxynucleotidyl transferase

SEQ ID NO: 6647 - DNA, 1182 bp, synthetic construct
  misc_feature 1..1182: note = Variant of terminal deoxynucleotidyl transferase
  source 1..1182: mol_type = other DNA
atgcaccatcatcaccatcacgggggctccggccatccggaaggtaataccccggagaaggaggtgccgagcgttatcgcccgtcatgttagtccgtacgcgtgccagcgcaagaccacgctgaataactacaacaaaaagatcaccgacgcgctggagatcatggccgagaactacaagtttaaagagaacctgcaggcgcgcctggaggcccgtcgcgccgcgagtgtcctgaaaagcctgccgttcgaggttaccagcatgaaagacatccaaggtctgccgtgcattaccgacgacgtacgtcctgtgatcgaagagatcatcgaagtaggcgagagcagccgtgttaaagaaatcctcaatgacgagcgctacaaggcctttaagcagttcaccagcgtgttcggtgtgggcgtcaagaccgcggaaaagtggtaccgtatgggcctccgtacgctggaagaagtaaaggccagtaagttcctgaagctgaacaagatgcagaaggcgggcttcctgtactacgaggatctggcgagcggtgttacgaaagaagaaaaagatgccgttctggatatcgtgaaggaaacggtgtggactgttgatccggatgcgctggtgaccatcgtgggcggtttccgccgtcgcaaaccacagggccacgacgttgacctgctgatcacgattccgggccgtcctacggatccggagctgctccacaacgtggttgatctgctcaagaagcaaggtctgctgctgtacggggacatccgtgagcgtacgttcgtggaggggcaactgccaaatcctgcgccggaccagctggacggccatcagaagtgcttcgccattctcaagctgtaccgcccgaaggtggataacagtgcggttgggacgtcgaagaaagtcgacatggctgaggttaaggattggaaagcggttcgtgtggatctggtggtcgctccagatgagcagttcgcctatgcgaaactcggttggacgggcagcggcatgtttcgtcgcgatactcgtcgctacgcggaggaagagaaaaatatgctgctcgacaaccatggtctctacgacctgaaaaagggcatttttctgagtgcgacgagcgaagaagagattttcggtcatctggacctggattatctggagccgtggtatcgcaacgcg

SEQ ID NO: 6648 - protein, 394 aa, synthetic construct
  REGION 1..394: note = Variant of terminal deoxynucleotidyl transferase
MHHHHHHGGSGHPEGNTPEKEVPSVIARHVSPYACQRKTTLNNYNKKITDALEIMAENYKFKENLQARLEARRAASVLKSLPFEVTSMKDIQGLPCITDDVRPVIEEIIEVGESSRVKEILNDERYKAFKQFTSVFGVGVKTAEKWYRMGLRTLEEVKASKFLKLNKMQKAGFLYYEDLASGVTKEEKDAVLDIVKETVWTVDPDALVTIVGGFRRRKPQGHDVDLLITIPGRPTDPELLHNVVDLLKKQGLLLYGDIRERTFVEGQLPNPAPDQLDGHQKCFAILKLYRPKVDNSAVGTSKKVDMAEVKDWKAVRVDLVVAPDEQFAYAKLGWTGSGMFRRDTRRYAEEEKNMLLDNHGLYDLKKGIFLSATSEEEIFGHLDLDYLEPWYRNA

SEQ ID NO: 6649 - DNA, 1182 bp, synthetic construct
  misc_feature 1..1182: note = Variant of terminal deoxynucleotidyl transferase
  source 1..1182: mol_type = other DNA
atgcaccatcatcaccatcacgggggctccggccatccggaaggtaataccccggagaaggaggtgccgagcgttatcgcccgtcatgttagtccgtacgcgtgccagcgcaagaccacgctgaataactacaacaaaaagatcaccgacgcgctggagatcatggccgagaactacaagtttaaagagaacatgcaggcgcgcctggaggcccgtcgcgccgcgagtgtcctgaaaagcctgccgttcgaggttaccagcatgaaagacatccaaggtctgccgtgcattaccgacgacgtacgtcctgtgatcgaagagatcatcgaagtaggcgagagcagccgtgttaaagaaatcctcaatgacgagcgctacaaggcctttaagcagttcaccagcgtgttcggtgtgggcgtcaagaccgcggaaaagtggtaccgtatgggcctgcgtacgctggaggaagtaaaggccagtaagttcctgaagctgaacaagatgcagaaggcgggcttcctgtactacgaggatctggcgagcggtgttacgaaagaagaaaaagatgccgttctggatatcgtgaaggaaacggtgtggactgttgatccggatgcgctggtgaccatcgtgggcggtttccgccgtcgcaaaccacagggccacgacgttgacctgctgattacgattccgggccgtcctacggatccggagctgctccacaacgtggttgatctgctcaagaagcaaggtctgctgctgtacggggacatccgtgagcgtacgttcgtggaggggcaactgccaaatcctgcgccggaccagctggacggccatcagaagtgcttcgccattctcaagctgtaccgcccgaaggtggataacagtgcggttgggacgtcgaagaaagtcgacatggctgaggttaaggattggaaagcggttcgtgtggatctggtggtcgctccagatgagcagttcgcctatgcgaaactcggttggacgggcagcggcatgtttcgtcgcgatactcgtcgctacgcggaggaagagcgcgacatgctgctcgacaaccatggtctctacgacctgaaaaagggcatttttctgagtgcgacgagcgaagaagagattttcggtcatctggacctggattatctggagccgtggtatcgcaacgcg

SEQ ID NO: 6650 - protein, 394 aa, synthetic construct
  REGION 1..394: note = Variant of terminal deoxynucleotidyl transferase
MHHHHHHGGSGHPEGNTPEKEVPSVIARHVSPYACQRKTTLNNYNKKITDALEIMAENYKFKENMQARLEARRAASVLKSLPFEVTSMKDIQGLPCITDDVRPVIEEIIEVGESSRVKEILNDERYKAFKQFTSVFGVGVKTAEKWYRMGLRTLEEVKASKFLKLNKMQKAGFLYYEDLASGVTKEEKDAVLDIVKETVWTVDPDALVTIVGGFRRRKPQGHDVDLLITIPGRPTDPELLHNVVDLLKKQGLLLYGDIRERTFVEGQLPNPAPDQLDGHQKCFAILKLYRPKVDNSAVGTSKKVDMAEVKDWKAVRVDLVVAPDEQFAYAKLGWTGSGMFRRDTRRYAEEERDMLLDNHGLYDLKKGIFLSATSEEEIFGHLDLDYLEPWYRNA

SEQ ID NO: 6651 - DNA, 1182 bp, synthetic construct
  misc_feature 1..1182: note = Variant of terminal deoxynucleotidyl transferase
  source 1..1182: mol_type = other DNA
atgcaccatcatcaccatcacgggggctccggccatccggaaggtaataccccggagaaggaggtgccgagcgttatcgcccgtcatgttagtccgtacgcgtgccagcgcaagaccacgctgaataactacaacaaaaagatcaccgacgcgctggagatcatggccgagaactacaagtttaaagagaacctgcaggcgcgcctggaggcccgtcgcgccgcgagtgtcctgaaaagcctgccgttcgaggttaccagcatgaaagacatccaaggtctgccgtgcattaccgacgacgtacgtcctgtgatcgaagagatcatcgaagtaggcgagagcagccgtgttaaagaaatcctcaatgacgagcgctacaagaaatttaagcagttcaccagcgtgttcggtgtgggcgtcaagaccgcggaaaagtggtaccgtatgggcctccgtacgctggaagaagtaaaggccagtaagttcctgaagctgaacaagatgcagaaggcgggcttcctgtactacgaggatctggcgagcggtgttacgaaagaagaaaaagatgccgttctggatatcgtgaaggaaacggtgtggactgttgatccggatgcgctggtgaccatcgtgggcggtttccgccgtcgcaaaccacagggccacgacgttgacctgctgatcacgattccgggccgtcctacggatccggagctgctccacaacgtggttgatctgctcaagaagcaaggtctgctgctgtacggggacatccgtgagcgtacgttcgtggaggggcaactgccaaatcctgcgccggaccagctggacggccatcagaagtgcttcgccattctcaagctgtaccgcccgaaggtggataacagtgcggttgggacgtcgaagaaagtcgacatggctgaggttaaggattggaaagcggttcgtgtggatctggtggtcgctccagatgagcagttcgcctatgcgaaactcggttggacgggcagcggcatgtttcgtcgcgatactcgtcgctacgcggaggaagagaaaaatatgctgctcgacaaccatggtctctacgacctgaaaaagggcatttttctgagtgcgacgagcgaagaagagattttcggtcatctggacctggattatctggagccgtggtatcgcaacgcg

SEQ ID NO: 6652 - protein, 394 aa, synthetic construct
  REGION 1..394: note = Variant of terminal deoxynucleotidyl transferase
MHHHHHHGGSGHPEGNTPEKEVPSVIARHVSPYACQRKTTLNNYNKKITDALEIMAENYKFKENLQARLEARRAASVLKSLPFEVTSMKDIQGLPCITDDVRPVIEEIIEVGESSRVKEILNDERYKKFKQFTSVFGVGVKTAEKWYRMGLRTLEEVKASKFLKLNKMQKAGFLYYEDLASGVTKEEKDAVLDIVKETVWTVDPDALVTIVGGFRRRKPQGHDVDLLITIPGRPTDPELLHNVVDLLKKQGLLLYGDIRERTFVEGQLPNPAPDQLDGHQKCFAILKLYRPKVDNSAVGTSKKVDMAEVKDWKAVRVDLVVAPDEQFAYAKLGWTGSGMFRRDTRRYAEEEKNMLLDNHGLYDLKKGIFLSATSEEEIFGHLDLDYLEPWYRNA

SEQ ID NO: 6653 - DNA, 1182 bp, synthetic construct
  misc_feature 1..1182: note = Variant of terminal deoxynucleotidyl transferase
  source 1..1182: mol_type = other DNA
atgcaccatcatcaccatcacgggggctccggccatccggaaggtaataccccggagaaggaggtgccgagcgttatcgcccgtcatgttagtccgtacgcgtgccagcgcaagaccacgctgaataactacaacaaaaagatcaccgacgcgctggagatcatggccgagaactacaagtttaaagagaacctgcaggcgcgcctggaggcccgtcgcgccgcgagtgtcctgaaaagcctgccgttcgaggttaccagcatgaaagacatccaaggtctgccgtgcattaccgacgacgtacgtcctgtgatcgaagagatcatcgaagtaggcgagagcagccgtgttaaagaaatcctcaatgacgagcgctacaaggcgtttaagcagttcaccagcgtgttcggtgtgggcgtcaagaccgcggaaaagtggtaccgtatgggcctgcgtacgctgaaggaagtaaaggccagtaagttcctgaagctgaacaagatgcagaaggcgggcttcctgtactacgaggatctggcgagcggtgttacgaaagaagaaaaagatgccgttctggatatcgtgaaggaaacggtgtggactgttgatccggatgcgctggtgaccatcgtgggcggtttccgccgtcgcaaaccacagggccacgacgttgacctgctgattacgattccgggccgtcctacggatccggagctgctccacaacgtggttgatctgctcaagaagcaaggtctgctgctgtacggggacatccgtgagcgtacgttcgtggaggggcaactgccaaatcctgcgccggaccagctggacggccatcagaagtgcttcgccattctcaagctgtaccgcccgaaggtggataacagtgcggttgggacgtcgaagaaagtcgacatggctgaggttaaggattggaaagcggttcgtgtggatctggtggtcgctccagatgagcagttcgcctatgcgaaactcggttggacgggcagcggcatgtttcgtcgcgatactcgtcgctacgcggaggaagagaaaaatatgctgctcgacaaccatggtctctacgacctgaaaaagggcatttttctgagtgcgacgagcgaagaagagattttcggtcatctggacctggattatctggagccgtggtatcgcaacgcg

SEQ ID NO: 6654 - protein, 394 aa, synthetic construct
  REGION 1..394: note = Variant of terminal deoxynucleotidyl transferase
MHHHHHHGGSGHPEGNTPEKEVPSVIARHVSPYACQRKTTLNNYNKKITDALEIMAENYKFKENLQARLEARRAASVLKSLPFEVTSMKDIQGLPCITDDVRPVIEEIIEVGESSRVKEILNDERYKAFKQFTSVFGVGVKTAEKWYRMGLRTLKEVKASKFLKLNKMQKAGFLYYEDLASGVTKEEKDAVLDIVKETVWTVDPDALVTIVGGFRRRKPQGHDVDLLITIPGRPTDPELLHNVVDLLKKQGLLLYGDIRERTFVEGQLPNPAPDQLDGHQKCFAILKLYRPKVDNSAVGTSKKVDMAEVKDWKAVRVDLVVAPDEQFAYAKLGWTGSGMFRRDTRRYAEEEKNMLLDNHGLYDLKKGIFLSATSEEEIFGHLDLDYLEPWYRNA

SEQ ID NO: 6655 - DNA, 1182 bp, synthetic construct
  misc_feature 1..1182: note = Variant of terminal deoxynucleotidyl transferase
  source 1..1182: mol_type = other DNA
atgcaccatcatcaccatcacgggggctccggccatccggaaggtaataccccggagaaggaggtgccgagcgttatcgcccgtcatgttagtccgtacgcgtgccagcgcaagaccacgctgaataactacaacaaaaagatcaccgacgcgctggagatcatggccgagaactacaagtttaaagagaacatgcaggcgcgcctggaggcccgtcgcgccgcgagtgtcctgaaaagcctgccgttcgaggttaccagcatgaaagacatccaaggtctgccgtgcattaccgacgacgtacgtcctgtgatcgaagagatcatcgaagtaggcgagagcagccgtgttaaagaaatcctcaatgacgagcgctacaagaaatttaagcagttcaccagcgtgttcggtgtgggcgtcaagaccgcggaaaagtggtaccgtatgggcctccgtacgctggaagaagtaaagcaaagtaagttcctgaagctgaacaagatgcagaaggcgggcttcctgtactacgaggatctggcgagcggtgttacgaaagaagaaaaagatgccgttctggatatcgtgaaggaaacggtgtggactgttgatccggatgcgctggtggaaatcgtgggcggtttccgccgtcgcaaaccacagggccacgacgttgacctgctgatcacgattccgggccgtcctacggatccggagctgctccacaacgtggttgatctgctcaagaagcaaggtctgctgctgtacggggacatccgtgagcgtacgttcgtggaggggcaactgccaaatcctgcgccggaccagctggacggccatcagaagtgcttcgccattctcaagctgtaccgcccgaaggtggataacagtgcggttgggacgtcgaagaaagtcgacatggctgaggttaaggattggaaagcggttcgtgtggatctggtggtcgctccagatgagcagttcgcctatgcgaaactcggttggacgggcagcggcatgtttcgtcgcgatactcgtcgctacgcggaggaagagcgcgatatgctgctcgacaaccatggtctctacgacctgaaaaagggcatttttctgccggcgacgagcgaagaagagattttcggtcatctggacctggattatctggagccgtggtatcgcaacgcg

SEQ ID NO: 6656 - protein, 394 aa, synthetic construct
  REGION 1..394: note = Variant of terminal deoxynucleotidyl transferase
MHHHHHHGGSGHPEGNTPEKEVPSVIARHVSPYACQRKTTLNNYNKKITDALEIMAENYKFKENMQARLEARRAASVLKSLPFEVTSMKDIQGLPCITDDVRPVIEEIIEVGESSRVKEILNDERYKKFKQFTSVFGVGVKTAEKWYRMGLRTLEEVKQSKFLKLNKMQKAGFLYYEDLASGVTKEEKDAVLDIVKETVWTVDPDALVEIVGGFRRRKPQGHDVDLLITIPGRPTDPELLHNVVDLLKKQGLLLYGDIRERTFVEGQLPNPAPDQLDGHQKCFAILKLYRPKVDNSAVGTSKKVDMAEVKDWKAVRVDLVVAPDEQFAYAKLGWTGSGMFRRDTRRYAEEERDMLLDNHGLYDLKKGIFLPATSEEEIFGHLDLDYLEPWYRNA

SEQ ID NO: 6657 - DNA, 1182 bp, synthetic construct
  misc_feature 1..1182: note = Variant of terminal deoxynucleotidyl transferase
  source 1..1182: mol_type = other DNA
atgcaccatcatcaccatcacgggggctccggccatccggaaggtaataccccggagaaggaggtgccgagcgttatcgcccgtcatgttagtccgtacgcgtgccagcgcaagaccacgctgaataactacaacaaaaagatcaccgacgcgctggagatcatggccgagaactacaagtttaaagagaacctgcaggcgcgcctggaggcccgtcgcgccgcgagtgtcctgaaaagcctgccgttcgaggttaccagcatgaaagacatccaaggtctgccgtgcattaccgacgacgtacgtcctgtgatcgaagagatcatcgaagtaggcgagagcagccgtgttaaagaaatcctcaatgacgagcgctacaagaaatttaagcagttcaccagcgtgttcggtgtgggcgtcaagaccgcggaaaagtggtaccgtatgggcctccgtacgctggaagaagtaaaggccagtaagttcctgaagctgaacaagatgcagaaggcgggcttcctgtactacgaggatctggcgagcggtgttacgaaagaagaaaaagatgccgttctggatatcgtgaaggaaacggtgtggactgttgatccggatgcgctggtggaaatcgtgggcggtttccgccgtcgcaaaccacagggccacgacgttgacctgctgattacgattccgggccgtcctacggatccggagctgctccacaacgtggttgatctgctcaagaagcaaggtctgctgctgtacggggacatccgtgagcgtacgttcgtggaggggcaactgccaaatcctgcgccggaccagctggacggccatcagaagtgcttcgccattctcaagctgtaccgcccgaaggtggataacagtgcggttgggacgtcgaagaaagtcgacatggctgaggttaaggattggaaagcggttcgtgtggatctggtggtcgctccagatgagcagttcgcctatgcgaaactcggttggacgggcagcggcatgtttcgtcgcgatactcgtcgctacgcggaggaagagcgcgatatgctgctcgacaaccatggtctctacgacctgaaaaagggcatttttctgagtgcggatagcgaagaagagattttcggtcatctggacctggattatctggagccgtggtatcgcaacgcg

SEQ ID NO: 6658 - protein, 394 aa, synthetic construct; identical to SEQ ID NO: 6612
  REGION 1..394: note = Variant of terminal deoxynucleotidyl transferase

SEQ ID NO: 6659 - DNA, 1182 bp, synthetic construct
  misc_feature 1..1182: note = Variant of terminal deoxynucleotidyl transferase
  source 1..1182: mol_type = other DNA
atgcaccatcatcaccatcacgggggctccggccatccggaaggtaataccccggagaaggaggtgccgagcgttatcgcccgtcatgttagtccgtacgcgtgccagcgcaagaccacgctgaataactacaacaaaaagatcaccgacgcgctggagatcatggccgagaactacaagtttaaagagaacctgcaggcgcgcctggaggcccgtcgcgccgcgagtgtcctgaaaagcctgccgttcgaggttaccagcatgaaagacatccaaggtctgccgtgcattaccgacgacgtacgtcctgtgatcgaagagatcatcgaagtaggcgagagcagccgtgttaaagaaatcctcaatgacgagcgctacaagaaatttaagcagttcaccagcgtgttcggtgtgggcgtcaagaccgcggaaaagtggtaccgtatgggcctgcgtacgctggaggaagtaaaggccagtaagttcctgaagctgaacaagatgcagaaggcgggcttcctgtactacgaggatctggcgagcggtgttacgaaagaagaaaaagatgccgttctggatatcgtgaaggaaacggtgtggactgttgatccggatgcgctggtggaaatcgtgggcggtttccgccgtcgcaaaccacagggccacgacgttgacctgctgatcacgattccgggccgtcctacggatccggagctgctccacaacgtggttgatctgctcaagaagcaaggtctgctgctgtacggggacatccgtgagcgtacgttcgtggaggggcaactgccaaatcctgcgccggaccagctggacggccatcagaagtgcttcgccattctcaagctgtaccgcccgaaggtggataacagtgcggttgggacgtcgaagaaagtcgacatggctgaggttaaggattggaaagcggttcgtgtggatctggtggtcgctccagatgagcagttcgcctatgcgaaactcggttggacgggcagcggcatgtttcgtcgcgatactcgtcgctacgcggaggaagagcgcgatatgctgctcgacaaccatggtctctacgacctgaaaaagggcatttttctgccggcggatagcgaagaagagattttcggtcatctggacctggattatctggagccgtggtatcgcaacgcg

SEQ ID NO: 6660 - protein, 394 aa, synthetic construct; identical to SEQ ID NO: 6598
  REGION 1..394: note = Variant of terminal deoxynucleotidyl transferase

SEQ ID NO: 6661 - DNA, 1182 bp, synthetic construct
  misc_feature 1..1182: note = Variant of terminal deoxynucleotidyl transferase
  source 1..1182: mol_type = other DNA
atgcaccatcatcaccatcacgggggctccggccatccggaaggtaataccccggagaaggaggtgccgagcgttatcgcccgtcatgttagtccgtacgcgtgccagcgcaagaccacgctgaataactacaacaaaaagatcaccgacgcgctggagatcatggccgagaactacaagtttaaagagaacctgcaggcgcgcctggaggcccgtcgcgccgcgagtgtcctgaaaagcctgccgttcgaggttaccagcatgaaagacatccaaggtctgccgtgcattaccgacgacgtacgtcctgtgatcgaagagatcatcgaagtaggcgagagcagccgtgttaaagaaatcctcaatgacgagcgctacaagaaatttaagcagttcaccagcgtgttcggtgtgggcgtcaagaccgcggaaaagtggtaccgtatgggcctgcgtacgctggaggaagtaaaggccagtaagttcctgaagctgaacaagatgcagaaggcgggcttcctgtactacgaggatctggcgagcggtgttacgaaagaagaaaaagatgccgttctggatatcgtgaaggaaacggtgtggactgttgatccggatgcgctggtgaccatcgtgggcggtttccgccgtcgcaaaacgcagggccacgacgttgacctgctgattacgattccgggccgtcctacggatccggagctgctccacaacgtggttgatctgctcaagaagcaaggtctgctgctgtacggggacatccgtgagcgtacgttcgtggaggggcaactgccaaatcctgcgccggaccagctggacggccatcagaagtgcttcgccattctcaagctgtaccgcccgaaggtggataacagtgcggttgggacgtcgaagaaagtcgacatggctgaggttaaggattggaaagcggttcgtgtggatctggtggtcgctccagatgagcagttcgcctatgcgaaactcggttggacgggcagcggcatgtttcgtcgcgatactcgtcgctacgcggaggaagagaaaaatatgctgctcgacaaccatggtctctacgacctgaaaaagggcatttttctgagtgcggacagcgaagaagagattttcggtcatctggacctggattatctggagccgtggtatcgcaacgcg

SEQ ID NO: 6662 - protein, 394 aa, synthetic construct
  REGION 1..394: note = Variant of terminal deoxynucleotidyl transferase
MHHHHHHGGSGHPEGNTPEKEVPSVIARHVSPYACQRKTTLNNYNKKITDALEIMAENYKFKENLQARLEARRAASVLKSLPFEVTSMKDIQGLPCITDDVRPVIEEIIEVGESSRVKEILNDERYKKFKQFTSVFGVGVKTAEKWYRMGLRTLEEVKASKFLKLNKMQKAGFLYYEDLASGVTKEEKDAVLDIVKETVWTVDPDALVTIVGGFRRRKTQGHDVDLLITIPGRPTDPELLHNVVDLLKKQGLLLYGDIRERTFVEGQLPNPAPDQLDGHQKCFAILKLYRPKVDNSAVGTSKKVDMAEVKDWKAVRVDLVVAPDEQFAYAKLGWTGSGMFRRDTRRYAEEEKNMLLDNHGLYDLKKGIFLSADSEEEIFGHLDLDYLEPWYRNA

SEQ ID NO: 6663 - DNA, 1182 bp, synthetic construct
  misc_feature 1..1182: note = Variant of terminal deoxynucleotidyl transferase
  source 1..1182: mol_type = other DNA
atgcaccatcatcaccatcacgggggctccggccatccggaaggtaataccccggagaaggaggtgccgagcgttatcgcccgtcatgttagtccgtacgcgtgccagcgcaagaccacgctgaataactacaacaaaaagatcaccgacgcgctggagatcatggccgagaactacaagtttaaagagaacctgcaggcgcgcctggaggcccgtcgcgccgcgagtgtcctgaaaagcctgccgttcgaggttaccagcatgaaagacatccaaggtctgccgtgcattaccgacgacgtacgtcctgtgatcgaagagatcatcgaagtaggcgagagcagccgtgttaaagaaatcctcaatgacgagcgctacaaggcctttaagcagttcaccagcgtgttcggtgtgggcgtcaagaccgcggaaaagtggtaccgtatgggcaaacgtacgctggaggaagtaaaggccagtaagttcctgaagctgaacaagatgcagaaggcgggcttcctgtactacgaggatctggcgagcggtgttacgaaagaagaaaaagatgccgttctggatatcgtgaaggaaacggtgtggactgttgatccggatgcgctggtggaaatcgtgggcggtttccgccgtcgcaaaccacagggccacgacgttgacctgctgatcacgattccgggccgtcctacggatccggagctgctccacaacgtggttgatctgctcaagaagcaaggtctgctgctgtacggggacatccgtgagcgtacgttcgtggaggggcaactgccaaatcctgcgccggaccagctggacggccatcagaagtgcttcgccattctcaagctgtaccgcccgaaggtggataacagtgcggttgggacgtcgaagaaagtcgacatggctgaggttaaggattggaaagcggttcgtgtggatctggtggtcgctccagatgagcagttcgcctatgcgaaactcggttggacgggcagcggcatgtttcgtcgcgatactcgtcgctacgcggaggaagagcgcgacatgctgctcgacaaccatggtctctacgacctgaaaaagggcatttttctgagtgcggatagcgaagaagagattttcggtcatctggacctggattatctggagccgtggtatcgcaacgcg

SEQ ID NO: 6664 - protein, 394 aa, synthetic construct; identical to SEQ ID NO: 6542
  REGION 1..394: note = Variant of terminal deoxynucleotidyl transferase

SEQ ID NO: 6665 - DNA, 1182 bp, synthetic construct
  misc_feature 1..1182: note = Variant of terminal deoxynucleotidyl transferase
  source 1..1182: mol_type = other DNA
atgcaccatcatcaccatcacgggggctccggccatccggaaggtaataccccggagaaggaggtgccgagcgttatcgcccgtcatgttagtccgtacgcgtgccagcgcaagaccacgctgaataactacaacaaaaagatcaccgacgcgctggagatcatggccgagaactacaagtttaaagagaacctgcaggcgcgcctggaggcccgtcgcgccgcgagtgtcctgaaaagcctgccgttcgaggttaccagcatgaaagacatccaaggtctgccgtgcattaccgacgacgtacgtcctgtgatcgaagagatcatcgaagtaggcgagagcagccgtgttaaagaaatcctcaatgacgagcgctacaaggcctttaagcagttcaccagcgtgttcggtgtgggcgtcaagaccgcggaaaagtggtaccgtatgggcctccgtacgctggaagaagtaaaggccagtaagttcctgaagctgaacaagatgcagaaggcgggcttcctgtactacgaggatctggcgagcggtgttacgaaagaagaaaaagatgccgttctggatatcgtgaaggaaacggtgtggactgttgatccggatgcgctggtgaccatcgtgggcggtttccgccgtcgcaaaccacagggccacgacgttgacctgctgatcacgattccgggccgtcctacggatccggagctgctccacaacgtggttgatctgctcaagaagcaaggtctgctgctgtacggggacatccgtgagcgtacgttcgtggaggggcaactgccaaatcctgcgccggaccagctggacggccatcagaagtgcttcgccattctcaagctgtaccgcccgaaggtggataacagtgcggttgggacgtcgaagaaagtcgacatggctgaggttaaggattggaaagcggttcgtgtggatctggtggtcgctccagatgagcagttcgcctatgcgaaactcggttggacgggcagcggcatgtttcgtcgcgatactcgtcgctacgcggaggaagagaaaaatatgctgctcgacaaccatggtctctacgacctgaaaaagggcatttttctgagtgcggatagcgaagaagagattttcggtcatctggacctggattatctggagccgtggtatcgcaacgcg

SEQ ID NO: 6666 - protein, 394 aa, synthetic construct; identical to SEQ ID NO: 6562
  REGION 1..394: note = Variant of terminal deoxynucleotidyl transferase

SEQ ID NO: 6667 - DNA, 1182 bp, synthetic construct
  misc_feature 1..1182: note = Variant of terminal deoxynucleotidyl transferase
  source 1..1182: mol_type = other DNA
atgcaccatcatcaccatcacgggggctccggccatccggaaggtaataccccggagaaggaggtgccgagcgttatcgcccgtcatgttagtccgtacgcgtgccagcgcaagaccacgctgaataactacaacaaaaagatcaccgacgcgctggagatcatggccgagaactacaagtttaaagagaacatgcaggcgcgcctggaggcccgtcgcgccgcgagtgtcctgaaaagcctgccgttcgaggttaccagcatgaaagacatccaaggtctgccgtgcattaccgacgacgtacgtcctgtgatcgaagagatcatcgaagtaggcgagagcagccgtgttaaagaaatcctcaatgacgagcgctacaaggcgtttaagcagttcaccagcgtgttcggtgtgggcgtcaagaccgcggaaaagtggtaccgtatgggcctccgtacgctggaagaagtaaaggccagtaagttcctgaagctgaacaagatgcagaaggcgggcttcctgtactacgaggatctggcgagcggtgttacgaaagaagaaaaagatgccgttctggatatcgtgaaggaaacggtgtggactgttgatccggatgcgctggtgaccatcgtgggcggtttccgccgtcgcaaaccacagggccacgacgttgacctgctgatcacgattccgggccgtcctacggatccggagctgctccacaacgtggttgatctgctcaagaagcaaggtctgctgctgtacggggacatccgtgagcgtacgttcgtggaggggcaactgccaaatcctgcgccggaccagctggacggccatcagaagtgcttcgccattctcaagctgtaccgcccgaaggtggataacagtgcggttgggacgtcgaagaaagtcgacatggctgaggttaaggattggaaagcggttcgtgtggatctggtggtcgctccagatgagcagttcgcctatgcgaaactcggttggacgggcagcggcatgtttcgtcgcgatactcgtcgctacgcggaggaagagcgcgatatgctgctcgacaaccatggtctctacgacctgaaaaagggcatttttctgagtgcggatagcgaagaagagattttcggtcatctggacctggattatctggagccgtggtatcgcaacgcg

SEQ ID NO: 6668 - protein, 394 aa, synthetic construct; identical to SEQ ID NO: 6594
  REGION 1..394: note = Variant of terminal deoxynucleotidyl transferase

SEQ ID NO: 6669 - DNA, 1182 bp, synthetic construct
  misc_feature 1..1182: note = Variant of terminal deoxynucleotidyl transferase
  source 1..1182: mol_type = other DNA
atgcaccatcatcaccatcacgggggctccggccatccggaaggtaataccccggagaaggaggtgccgagcgttatcgcccgtcatgttagtccgtacgcgtgccagcgcaagaccacgctgaataactacaacaaaaagatcaccgacgcgctggagatcatggccgagaactacaagtttaaagagaacctgcaggcgcgcctggaggcccgtcgcgccgcgagtgtcctgaaaagcctgccgttcgaggttaccagcatgaaagacatccaaggtctgccgtgcattaccgacgacgtacgtcctgtgatcgaagagatcatcgaagtaggcgagagcagccgtgttaaagaaatcctcaatgacgagcgctacaagaaatttaagcagttcaccagcgtgttcggtgtgggcgtcaagaccgcggaaaagtggtaccgtatgggcctccgtacgctggaagaagtaaaggccagtaagttcctgaagctgaacaagatgcagaaggcgggcttcctgtactacgaggatctggcgagcggtgttacgaaagaagaaaaagatgccgttctggatatcgtgaaggaaacggtgtggactgttgatccggatgcgctggtgaccatcgtgggcggtttccgccgtcgcaaaacgcagggccacgacgttgacctgctgatcacgattccgggccgtcctacggatccggagctgctccacaacgtggttgatctgctcaagaagcaaggtctgctgctgtacggggacatccgtgagcgtacgttcgtggaggggcaactgccaaatcctgcgccggaccagctggacggccatcagaagtgcttcgccattctcaagctgtaccgcccgaaggtggataacagtgcggttgggacgtcgaagaaagtcgacatggctgaggttaaggattggaaagcggttcgtgtggatctggtggtcgctccagatgagcagttcgcctatgcgaaactcggttggacgggcagcggcatgtttcgtcgcgatactcgtcgctacgcggaggaagagcgcgatatgctgctcgacaaccatggtctctacgacctgaaaaagggcatttttctgccggcgacgagcgaagaagagattttcggtcatctggacctggattatctggagccgtggtatcgcaacgcg

SEQ ID NO: 6670 - protein, 394 aa, synthetic construct
  REGION 1..394: note = Variant of terminal deoxynucleotidyl transferase
MHHHHHHGGSGHPEGNTPEKEVPSVIARHVSPYACQRKTTLNNYNKKITDALEIMAENYKFKENLQARLEARRAASVLKSLPFEVTSMKDIQGLPCITDDVRPVIEEIIEVGESSRVKEILNDERYKKFKQFTSVFGVGVKTAEKWYRMGLRTLEEVKASKFLKLNKMQKAGFLYYEDLASGVTKEEKDAVLDIVKETVWTVDPDALVTIVGGFRRRKTQGHDVDLLITIPGRPTDPELLHNVVDLLKKQGLLLYGDIRERTFVEGQLPNPAPDQLDGHQKCFAILKLYRPKVDNSAVGTSKKVDMAEVKDWKAVRVDLVVAPDEQFAYAKLGWTGSGMFRRDTRRYAEEERDMLLDNHGLYDLKKGIFLPATSEEEIFGHLDLDYLEPWYRNA

SEQ ID NO: 6671 - DNA, 1182 bp, synthetic construct
  misc_feature 1..1182: note = Variant of terminal deoxynucleotidyl transferase
  source 1..1182: mol_type = other DNA
atgcaccatcatcaccatcacgggggctccggccatccggaaggtaataccccggagaaggaggtgccgagcgttatcgcccgtcatgttagtccgtacgcgtgccagcgcaagaccacgctgaataactacaacaaaaagatcaccgacgcgctggagatcatggccgagaactacaagtttaaagagaacctgcaggcgcgcctggaggcccgtcgcgccgcgagtgtcctgaaaagcctgccgttcgaggttaccagcatgaaagacatccaaggtctgccgtgcattaccgacgacgtacgtcctgtgatcgaagagatcatcgaagtaggcgagagcagccgtgttaaagaaatcctcaatgacgagcgctacaaggcgtttaagcagttcaccagcgtgttcggtgtgggcgtcaagaccgcggaaaagtggtaccgtatgggcaaacgtacgctgaaggaagtaaaggccagtaagttcctgaagctgaacaagatgcagaaggcgggcttcctgtactacgaggatctggcgagcggtgttacgaaagaagaaaaagatgccgttctggatatcgtgaaggaaacggtgtggactgttgatccggatgcgctggtggaaatcgtgggcggtttccgccgtcgcaaaccgcagggccacgacgttgacctgctgatcacgattccgggccgtcctacggatccggagctgctccacaacgtggttgatctgctcaagaagcaaggtctgctgctgtacggggacatccgtgagcgtacgttcgtggaggggcaactgccaaatcctgcgccggaccagctggacggccatcagaagtgcttcgccattctcaagctgtaccgcccgaaggtggataacagtgcggttgggacgtcgaagaaagtcgacatggctgaggttaaggattggaaagcggttcgtgtggatctggtggtcgctccagatgagcagttcgcctatgcgaaactcggttggacgggcagcggcatgtttcgtcgcgatactcgtcgctacgcggaggaagagcgcgacatgctgctcgacaaccatggtctctacgacctgaaaaagggcatttttctgagtgcgacgagcgaagaagagattttcggtcatctggacctggattatctggagccgtggtatcgcaacgcg

SEQ ID NO: 6672 - protein, 394 aa, synthetic construct
  REGION 1..394: note = Variant of terminal deoxynucleotidyl transferase
MHHHHHHGGSGHPEGNTPEKEVPSVIARHVSPYACQRKTTLNNYNKKITDALEIMAENYKFKENLQARLEARRAASVLKSLPFEVTSMKDIQGLPCITDDVRPVIEEIIEVGESSRVKEILNDERYKAFKQFTSVFGVGVKTAEKWYRMGKRTLKEVKASKFLKLNKMQKAGFLYYEDLASGVTKEEKDAVLDIVKETVWTVDPDALVEIVGGFRRRKPQGHDVDLLITIPGRPTDPELLHNVVDLLKKQGLLLYGDIRERTFVEGQLPNPAPDQLDGHQKCFAILKLYRPKVDNSAVGTSKKVDMAEVKDWKAVRVDLVVAPDEQFAYAKLGWTGSGMFRRDTRRYAEEERDMLLDNHGLYDLKKGIFLSATSEEEIFGHLDLDYLEPWYRNA

SEQ ID NO: 6673 - DNA, 1182 bp, synthetic construct
  misc_feature 1..1182: note = Variant of terminal deoxynucleotidyl transferase
  source 1..1182: mol_type = other DNA
atgcaccatcatcaccatcacgggggctccggccatccggaaggtaataccccggagaaggaggtgccgagcgttatcgcccgtcatgttagtccgtacgcgtgccagcgcaagaccacgctgaataactacaacaaaaagatcaccgacgcgctggagatcatggccgagaactacaagtttaaagagaacatgcaggcgcgcctggaggcccgtcgcgccgcgagtgtcctgaaaagcctgccgttcgaggttaccagcatgaaagacatccaaggtctgccgtgcattaccgacgacgtacgtcctgtgatcgaagagatcatcgaagtaggcgagagcagccgtgttaaagaaatcctcaatgacgagcgctacaagaaatttaagcagttcaccagcgtgttcggtgtgggcgtcaagaccgcggaaaagtggtaccgtatgggcctccgtacgctggaagaagtaaaggccagtaagttcctgaagctgaacaagatgcagaaggcgggcttcctgtactacgaggatctggcgagcggtgttacgaaagaagaaaaagatgccgttctggatatcgtgaaggaaacggtgtggactgttgatccggatgcgctggtgaccatcgtgggcggtttccgccgtcgcaaaacgcagggccacgacgttgacctgctgatcacgattccgggccgtcctacggatccggagctgctccacaacgtggttgatctgctcaagaagcaaggtctgctgctgtacggggacatccgtgagcgtacgttcgtggaggggcaactgccaaatcctgcgccggaccagctggacggccatcagaagtgcttcgccattctcaagctgtaccgcccgaaggtggataacagtgcggttgggacgtcgaagaaagtcgacatggctgaggttaaggattggaaagcggttcgtgtggatctggtggtcgctccagatgagcagttcgcctatgcgaaactcggttggacgggcagcggcatgtttcgtcgcgatactcgtcgctacgcggaggaagagcgcgacatgctgctcgacaaccatggtctctacgacctgaaaaagggcatttttctgagtgcgacgagcgaagaagagattttcggtcatctggacctggattatctggagccgtggtatcgcaacgcg

SEQ ID NO: 6674 - protein, 394 aa, synthetic construct
  REGION 1..394: note = Variant of terminal deoxynucleotidyl transferase
MHHHHHHGGSGHPEGNTPEKEVPSVIARHVSPYACQRKTTLNNYNKKITDALEIMAENYKFKENMQARLEARRAASVLKSLPFEVTSMKDIQGLPCITDDVRPVIEEIIEVGESSRVKEILNDERYKKFKQFTSVFGVGVKTAEKWYRMGLRTLEEVKASKFLKLNKMQKAGFLYYEDLASGVTKEEKDAVLDIVKETVWTVDPDALVTIVGGFRRRKTQGHDVDLLITIPGRPTDPELLHNVVDLLKKQGLLLYGDIRERTFVEGQLPNPAPDQLDGHQKCFAILKLYRPKVDNSAVGTSKKVDMAEVKDWKAVRVDLVVAPDEQFAYAKLGWTGSGMFRRDTRRYAEEERDMLLDNHGLYDLKKGIFLSATSEEEIFGHLDLDYLEPWYRNA

SEQ ID NO: 6675 - DNA, 1182 bp, synthetic construct
  misc_feature 1..1182: note = Variant of terminal deoxynucleotidyl transferase
  source 1..1182: mol_type = other DNA
atgcaccatcatcaccatcacgggggctccggccatccggaaggtaataccccggagaaggaggtgccgagcgttatcgcccgtcatgttagtccgtacgcgtgccagcgcaagaccacgctgaataactacaacaaaaagatcaccgacgcgctggagatcatggccgagaactacaagtttaaagagaacctgcaggcgcgcctggaggcccgtcgcgccgcgagtgtcctgaaaagcctgccgttcgaggttaccagcatgaaagacatccaaggtctgccgtgcattaccgacgacgtacgtcctgtgatcgaagagatcatcgaagtaggcgagagcagccgtgttaaagaaatcctcaatgacgagcgctacaaggcgtttaagcagttcaccagcgtgttcggtgtgggcgtcaagaccgcggaaaagtggtaccgtatgggcctccgtacgctggaagaagtaaaggccagtaagttcctgaagctgaacaagatgcagaaggcgggcttcctgtactacgaggatctggcgagcggtgttacgaaagaagaaaaagatgccgttctggatatcgtgaaggaaacggtgtggactgttgatccggatgcgctggtggaaatcgtgggcggtttccgccgtcgcaaaccacagggccacgacgttgacctgctgatcacgattccgggccgtcctacggatccggagctgctccacaacgtggttgatctgctcaagaagcaaggtctgctgctgtacggggacatccgtgagcgtacgttcgtggaggggcaactgccaaatcctgcgccggaccagctggacggccatcagaagtgcttcgccattctcaagctgtaccgcccgaaggtggataacagtgcggttgggacgtcgaagaaagtcgacatggctgaggttaaggattggaaagcggttcgtgtggatctggtggtcgctccagatgagcagttcgcctatgcgaaactcggttggacgggcagcggcatgtttcgtcgcgatactcgtcgctacgcggaggaagagcgcgacatgctgctcgacaaccatggtctctacgacctgaaaaagggcatttttctgagtgcgacgagcgaagaagagattttcggtcatctggacctggattatctggagccgtggtatcgcaacgcg

SEQ ID NO: 6676 - protein, 394 aa, synthetic construct; identical to SEQ ID NO: 6554
  REGION 1..394: note = Variant of terminal deoxynucleotidyl transferase

SEQ ID NO: 6677 - DNA, 1182 bp, synthetic construct
  misc_feature 1..1182: note = Variant of terminal deoxynucleotidyl transferase
  source 1..1182: mol_type = other DNA
atgcaccatcatcaccatcacgggggctccggccatccggaaggtaataccccggagaaggaggtgccgagcgttatcgcccgtcatgttagtccgtacgcgtgccagcgcaagaccacgctgaataactacaacaaaaagatcaccgacgcgctggagatcatggccgagaactacaagtttaaagagaacctgcaggcgcgcctggaggcccgtcgcgccgcgagtgtcctgaaaagcctgccgttcgaggttaccagcatgaaagacatccaaggtctgccgtgcattaccgacgacgtacgtcctgtgatcgaagagatcatcgaagtaggcgagagcagccgtgttaaagaaatcctcaatgacgagcgctacaaggcgtttaagcagttcaccagcgtgttcggtgtgggcgtcaagaccgcggaaaagtggtaccgtatgggcctccgtacgctggaagaagtaaaggccagtaagttcctgaagctgaacaagatgcagaaggcgggcttcctgtactacgaggatctggcgagcggtgttacgaaagaagaaaaagatgccgttctggatatcgtgaaggaaacggtgtggactgttgatccggatgcgctggtgaccatcgtgggcggtttccgccgtcgcaaaccacagggccacgacgttgacctgctgctgacgattccgggccgtcctacggatccggagctgctccacaacgtggttgatctgctcaagaagcaaggtctgctgctgtacggggacatccgtgagcgtacgttcgtggaggggcaactgccaaatcctgcgccggaccagctggacggccatcagaagtgcttcgccattctcaagctgtaccgcccgaaggtggataacagtgcggttgggacgtcgaagaaagtcgacatggctgaggttaaggattggaaagcggttcgtgtggatctggtggtcgctccagatgagcagttcgcctatgcgaaactcggttggacgggcagcggcatgtttcgtcgcgatactcgtcgctacgcggaggaagagaaaaatatgctgctcgacaaccatggtctctacgacctgaaaaagggcatttttctgagtgcggacagcgaagaagagattttcggtcatctggacctggattatctggagccgtggtatcgcaacgcg

SEQ ID NO: 6678 - protein, 394 aa, synthetic construct
  REGION 1..394: note = Variant of terminal deoxynucleotidyl transferase
MHHHHHHGGSGHPEGNTPEKEVPSVIARHVSPYACQRKTTLNNYNKKITDALEIMAENYKFKENLQARLEARRAASVLKSLPFEVTSMKDIQGLPCITDDVRPVIEEIIEVGESSRVKEILNDERYKAFKQFTSVFGVGVKTAEKWYRMGLRTLEEVKASKFLKLNKMQKAGFLYYEDLASGVTKEEKDAVLDIVKETVWTVDPDALVTIVGGFRRRKPQGHDVDLLLTIPGRPTDPELLHNVVDLLKKQGLLLYGDIRERTFVEGQLPNPAPDQLDGHQKCFAILKLYRPKVDNSAVGTSKKVDMAEVKDWKAVRVDLVVAPDEQFAYAKLGWTGSGMFRRDTRRYAEEEKNMLLDNHGLYDLKKGIFLSADSEEEIFGHLDLDYLEPWYRNA

SEQ ID NO: 6679 - DNA, 1182 bp, synthetic construct
  misc_feature 1..1182: note = Variant of terminal deoxynucleotidyl transferase
  source 1..1182: mol_type = other DNA
atgcaccatcatcaccatcacgggggctccggccatccggaaggtaataccccggagaaggaggtgccgagcgttatcgcccgtcatgttagtccgtacgcgtgccagcgcaagaccacgctgaataactacaacaaaaagatcaccgacgcgctggagatcatggccgagaactacaagtttaaagagaacctgcaggcgcgcctggaggcccgtcgcgccgcgagtgtcctgaaaagcctgccgttcgaggttaccagcatgaaagacatccaaggtctgccgtgcattaccgacgacgtacgtcctgtgatcgaagagatcatcgaagtaggcgagagcagccgtgttaaagaaatcctcaatgacgagcgctacaagaaatttaagcagttcaccagcgtgttcggtgtgggcgtcaagaccgcggaaaagtggtaccgtatgggcctgcgtacgctggaggaagtaaaggccagtaagttcctgaagctgaacaagatgcagaaggcgggcttcctgtactacgaggatctggcgagcggtgttacgaaagaagaaaaagatgccgttctggatatcgtgaaggaaacggtgtggactgttgatccggatgcgctggtgaccatcgtgggcggtttccgccgtcgcaaaccgcagggccacgacgttgacctgctgatcacgattccgggccgtcctacggatccggagctgctccacaacgtggttgatctgctcaagaagcaaggtctgctgctgtacggggacatccgtgagcgtacgttcgtggaggggcaactgccaaatcctgcgccggaccagctggacggccatcagaagtgcttcgccattctcaagctgtaccgcccgaaggtggataacagtgcggttgggacgtcgaagaaagtcgacatggctgaggttaaggattggaaagcggttcgtgtggatctggtggtcgctccagatgagcagttcgcctatgcgaaactcggttggacgggcagcggcatgtttcgtcgcgatactcgtcgctacgcggaggaagagcgcgacatgctgctcgacaaccatggtctctacgacctgaaaaagggcatttttctgagtgcggacagcgaagaagagattttcggtcatctggacctggattatctggagccgtggtatcgcaacgcg

SEQ ID NO: 6680 - protein, 394 aa, synthetic construct
  REGION 1..394: note = Variant of terminal deoxynucleotidyl transferase
MHHHHHHGGSGHPEGNTPEKEVPSVIARHVSPYACQRKTTLNNYNKKITDALEIMAENYKFKENLQARLEARRAASVLKSLPFEVTSMKDIQGLPCITDDVRPVIEEIIEVGESSRVKEILNDERYKKFKQFTSVFGVGVKTAEKWYRMGLRTLEEVKASKFLKLNKMQKAGFLYYEDLASGVTKEEKDAVLDIVKETVWTVDPDALVTIVGGFRRRKPQGHDVDLLITIPGRPTDPELLHNVVDLLKKQGLLLYGDIRERTFVEGQLPNPAPDQLDGHQKCFAILKLYRPKVDNSAVGTSKKVDMAEVKDWKAVRVDLVVAPDEQFAYAKLGWTGSGMFRRDTRRYAEEERDMLLDNHGLYDLKKGIFLSADSEEEIFGHLDLDYLEPWYRNA

SEQ ID NO: 6681 - DNA, 1182 bp, synthetic construct
  misc_feature 1..1182: note = Variant of terminal deoxynucleotidyl transferase
  source 1..1182: mol_type = other DNA
atgcaccatcatcaccatcacgggggctccggccatccggaaggtaataccccggagaaggaggtgccgagcgttatcgcccgtcatgttagtccgtacgcgtgccagcgcaagaccacgctgaataactacaacaaaaagatcaccgacgcgctggagatcatggccgagaactacaagtttaaagagaacctgcaggcgcgcctggaggcccgtcgcgccgcgagtgtcctgaaaagcctgccgttcgaggttaccagcatgaaagacatccaaggtctgccgtgcattaccgacgacgtacgtcctgtgatcgaagagatcatcgaagtaggcgagagcagccgtgttaaagaaatcctcaatgacgagcgctacaagaaatttaagcagttcaccagcgtgttcggtgtgggcgtcaagaccgcggaaaagtggtaccgtatgggcctccgtacgctggaagaagtaaaggccagtaagttcctgaagctgaacaagatgcagaaggcgggcttcctgtactacgaggatctggcgagcggtgttacgaaagaagaaaaagatgccgttctggatatcgtgaaggaaacggtgtggactgttgatccggatgcgctggtgaccatcgtgggcggtttccgccgtcgcaaaccacagggccacgacgttgacctgctgctgacgattccgggccgtcctacggatccggagctgctccacaacgtggttgatctgctcaagaagcaaggtctgctgctgtacggggacatccgtgagcgtacgttcgtggaggggcaactgccaaatcctgcgccggaccagctggacggccatcagaagtgcttcgccattctcaagctgtaccgcccgaaggtggataacagtgcggttgggacgtcgaagaaagtcgacatggctgaggttaaggattggaaagcggttcgtgtggatctggtggtcgctccagatgagcagttcgcctatgcgaaactcggttggacgggcagcggcatgtttcgtcgcgatactcgtcgctacgcggaggaagagaaaaatatgctgctcgacaaccatggtctctacgacctgaaaaagggcatttttctgagtgcggacagcgaagaagagattttcggtcatctggacctggattatctggagccgtggtatcgcaacgcg

SEQ ID NO: 6682 - protein, 394 aa, synthetic construct
  REGION 1..394: note = Variant of terminal deoxynucleotidyl transferase
MHHHHHHGGSGHPEGNTPEKEVPSVIARHVSPYACQRKTTLNNYNKKITDALEIMAENYKFKENLQARLEARRAASVLKSLPFEVTSMKDIQGLPCITDDVRPVIEEIIEVGESSRVKEILNDERYKKFKQFTSVFGVGVKTAEKWYRMGLRTLEEVKASKFLKLNKMQKAGFLYYEDLASGVTKEEKDAVLDIVKETVWTVDPDALVTIVGGFRRRKPQGHDVDLLLTIPGRPTDPELLHNVVDLLKKQGLLLYGDIRERTFVEGQLPNPAPDQLDGHQKCFAILKLYRPKVDNSAVGTSKKVDMAEVKDWKAVRVDLVVAPDEQFAYAKLGWTGSGMFRRDTRRYAEEEKNMLLDNHGLYDLKKGIFLSADSEEEIFGHLDLDYLEPWYRNA

SEQ ID NO: 6683 - DNA, 1182 bp, synthetic construct
  misc_feature 1..1182: note = Variant of terminal deoxynucleotidyl transferase
  source 1..1182: mol_type = other DNA
atgcaccatcatcaccatcacgggggctccggccatccggaaggtaataccccggagaaggaggtgccgagcgttatcgcccgtcatgttagtccgtacgcgtgccagcgcaagaccacgctgaataactacaacaaaaagatcaccgacgcgctggagatcatggccgagaactacaagtttaaagagaacctgcaggcgcgcctggaggcccgtcgcgccgcgagtgtcctgaaaagcctgccgttcgaggttaccagcatgaaagacatccaaggtctgccgtgcattaccgacgacgtacgtcctgtgatcgaagagatcatcgaagtaggcgagagcagccgtgttaaagaaatcctcaatgacgagcgctacaaggcgtttaagcagttcaccagcgtgttcggtgtgggcgtcaagaccgcggaaaagtggtaccgtatgggcaaacgtacgctgaaggaagtaaaggccagtaagttcctgaagctgaacaagatgcagaaggcgggcttcctgtactacgaggatctggcgagcggtgttacgaaagaagaaaaagatgccgttctggatatcgtgaaggaaacggtgtggactgttgatccggatgcgctggtgaccatcgtgggcggtttccgccgtcgcaaaccacagggccacgacgttgacctgctgattacgattccgggccgtcctacggatccggagctgctccacaacgtggttgatctgctcaagaagcaaggtctgctgctgtacggggacatccgtgagcgtacgttcgtggaggggcaactgccaaatcctgcgccggaccagctggacggccatcagaagtgcttcgccattctcaagctgtaccgcccgaaggtggataacagtgcggttgggacgtcgaagaaagtcgacatggctgaggttaaggattggaaagcggttcgtgtggatctggtggtcgctccagatgagcagttcgcctatgcgaaactcggttggacgggcagcggcatgtttcgtcgcgatactcgtcgctacgcggaggaagagaaaaatatgctgctcgacaaccatggtctctacgacctgaaaaagggcatttttctgccggcgacgagcgaagaagagattttcggtcatctggacctggattatctggagccgtggtatcgcaacgcg

SEQ ID NO: 6684 - protein, 394 aa, synthetic construct
  REGION 1..394: note = Variant of terminal deoxynucleotidyl transferase
MHHHHHHGGSGHPEGNTPEKEVPSVIARHVSPYACQRKTTLNNYNKKITDALEIMAENYKFKENLQARLEARRAASVLKSLPFEVTSMKDIQGLPCITDDVRPVIEEIIEVGESSRVKEILNDERYKAFKQFTSVFGVGVKTAEKWYRMGKRTLKEVKASKFLKLNKMQKAGFLYYEDLASGVTKEEKDAVLDIVKETVWTVDPDALVTIVGGFRRRKPQGHDVDLLITIPGRPTDPELLHNVVDLLKKQGLLLYGDIRERTFVEGQLPNPAPDQLDGHQKCFAILKLYRPKVDNSAVGTSKKVDMAEVKDWKAVRVDLVVAPDEQFAYAKLGWTGSGMFRRDTRRYAEEEKNMLLDNHGLYDLKKGIFLPATSEEEIFGHLDLDYLEPWYRNA

SEQ ID NO: 6685 - DNA, 1182 bp, synthetic construct
  misc_feature 1..1182: note = Variant of terminal deoxynucleotidyl transferase
  source 1..1182: mol_type = other DNA
atgcaccatcatcaccatcacgggggctccggccatccggaaggtaataccccggagaaggaggtgccgagcgttatcgcccgtcatgttagtccgtacgcgtgccagcgcaagaccacgctgaataactacaacaaaaagatcaccgacgcgctggagatcatggccgagaactacaagtttaaagagaacctgcaggcgcgcctggaggcccgtcgcgccgcgagtgtcctgaaaagcctgccgttcgaggttaccagcatgaaagacatccaaggtctgccgtgcattaccgacgacgtacgtcctgtgatcgaagagatcatcgaagtaggcgagagcagccgtgttaaagaaatcctcaatgacgagcgctacaagaaatttaagcagttcaccagcgtgttcggtgtgggcgtcaagaccgcggaaaagtggtaccgtatgggcctccgtacgctggaagaagtaaaggccagtaagttcctgaagctgaacaagatgcagaaggcgggcttcctgtactacgaggatctggcgagcggtgttacgaaagaagaaaaagatgccgttctggatatcgtgaaggaaacggtgtggactgttgatccggatgcgctggtgaccatcgtgggcggtttccgccgtcgcaaaccgcagggccacgacgttgacctgctgatcacgattccgggccgtcctacggatccggagctgctccacaacgtggttgatctgctcaagaagcaaggtctgctgctgtacggggacatccgtgagcgtacgttcgtggaggggcaactgccaaatcctgcgccggaccagctggacggccatcagaagtgcttcgccattctcaagctgtaccgcccgaaggtggataacagtgcggttgggacgtcgaagaaagtcgacatggctgaggttaaggattggaaagcggttcgtgtggatctggtggtcgctccagatgagcagttcgcctatgcgaaactcggttggacgggcagcggcatgtttcgtcgcgatactcgtcgctacgcggaggaagagcgcgacatgctgctcgacaaccatggtctctacgacctgaaaaagggcatttttctgccggcggatagcgaagaagagattttcggtcatctggacctggattatctggagccgtggtatcgcaacgcg

SEQ ID NO: 6686 - protein, 394 aa, synthetic construct
  REGION 1..394: note = Variant of terminal deoxynucleotidyl transferase
MHHHHHHGGSGHPEGNTPEKEVPSVIARHVSPYACQRKTTLNNYNKKITDALEIMAENYKFKENLQARLEARRAASVLKSLPFEVTSMKDIQGLPCITDDVRPVIEEIIEVGESSRVKEILNDERYKKFKQFTSVFGVGVKTAEKWYRMGLRTLEEVKASKFLKLNKMQKAGFLYYEDLASGVTKEEKDAVLDIVKETVWTVDPDALVTIVGGFRRRKPQGHDVDLLITIPGRPTDPELLHNVVDLLKKQGLLLYGDIRERTFVEGQLPNPAPDQLDGHQKCFAILKLYRPKVDNSAVGTSKKVDMAEVKDWKAVRVDLVVAPDEQFAYAKLGWTGSGMFRRDTRRYAEEERDMLLDNHGLYDLKKGIFLPADSEEEIFGHLDLDYLEPWYRNA

SEQ ID NO: 6687 - DNA, 1182 bp, synthetic construct
  misc_feature 1..1182: note = Variant of terminal deoxynucleotidyl transferase
  source 1..1182: mol_type = other DNA
atgcaccatcatcaccatcacgggggctccggccatccggaaggtaataccccggagaaggaggtgccgagcgttatcgcccgtcatgttagtccgtacgcgtgccagcgcaagaccacgctgaataactacaacaaaaagatcaccgacgcgctggagatcatggccgagaactacaagtttaaagagaacctgcaggcgcgcctggaggcccgtcgcgccgcgagtgtcctgaaaagcctgccgttcgaggttaccagcatgaaagacatccaaggtctgccgtgcattaccgacgacgtacgtcctgtgatcgaagagatcatcgaagtaggcgagagcagccgtgttaaagaaatcctcaatgacgagcgctacaagaaatttaagcagttcaccagcgtgttcggtgtgggcgtcaagaccgcggaaaagtggtaccgtatgggcctccgtacgctggaagaagtaaaggccagtaagttcctgaagctgaacaagatgcagaaggcgggcttcctgtactacgaggatctggcgagcggtgttacgaaagaagaaaaagatgccgttctggatatcgtgaaggaaacggtgtggactgttgatccggatgcgctggtgaccatcgtgggcggtttccgccgtcgcaaaccacagggccacgacgttgacctgctgatcacgattccgggccgtcctacggatccggagctgctccacaacgtggttgatctgctcaagaagcaaggtctgctgctgtacggggacatccgtgagcgtacgttcgtggaggggcaactgccaaatcctgcgccggaccagctggacggccatcagaagtgcttcgccattctcaagctgtaccgcccgaaggtggataacagtgcggttgggacgtcgaagaaagtcgacatggctgaggttaaggattggaaagcggttcgtgtggatctggtggtcgctccagatgagcagttcgcctatgcgaaactcggttggacgggcagcggcatgtttcgtcgcgatactcgtcgctacgcggaggaagagcgcgacatgctgctcgacaaccatggtctctacgacctgaaaaagggcatttttctgccggcgacgagcgaagaagagattttcggtcatctggacctggattatctggagccgtggtatcgcaacgcg

SEQ ID NO: 6688 - protein, 394 aa, synthetic construct
  REGION 1..394: note = Variant of terminal deoxynucleotidyl transferase
MHHHHHHGGSGHPEGNTPEKEVPSVIARHVSPYACQRKTTLNNYNKKITDALEIMAENYKFKENLQARLEARRAASVLKSLPFEVTSMKDIQGLPCITDDVRPVIEEIIEVGESSRVKEILNDERYKKFKQFTSVFGVGVKTAEKWYRMGLRTLEEVKASKFLKLNKMQKAGFLYYEDLASGVTKEEKDAVLDIVKETVWTVDPDALVTIVGGFRRRKPQGHDVDLLITIPGRPTDPELLHNVVDLLKKQGLLLYGDIRERTFVEGQLPNPAPDQLDGHQKCFAILKLYRPKVDNSAVGTSKKVDMAEVKDWKAVRVDLVVAPDEQFAYAKLGWTGSGMFRRDTRRYAEEERDMLLDNHGLYDLKKGIFLPATSEEEIFGHLDLDYLEPWYRNA

SEQ ID NO: 6689 - DNA, 1182 bp, synthetic construct
  misc_feature 1..1182: note = Variant of terminal deoxynucleotidyl transferase
  source 1..1182: mol_type = other DNA
atgcaccatcatcaccatcacgggggctccggccatccggaaggtaataccccggagaaggaggtgccgagcgttatcgcccgtcatgttagtccgtacgcgtgccagcgcaagaccacgctgaataactacaacaaaaagatcaccgacgcgctggagatcatggccgagaactacaagtttaaagagaacctgcaggcgcgcctggaggcccgtcgcgccgcgagtgtcctgaaaagcctgccgttcgaggttaccagcatgaaagacatccaaggtctgccgtgcattaccgacgacgtacgtcctgtgatcgaagagatcatcgaagtaggcgagagcagccgtgttaaagaaatcctcaatgacgagcgctacaaggcgtttaagcagttcaccagcgtgttcggtgtgggcgtcaagaccgcggaaaagtggtaccgtatgggcaaacgtacgctggaggaagtaaaggccagtaagttcctgaagctgaacaagatgcagaaggcgggcttcctgtactacgaggatctggcgagcggtgttacgaaagaagaaaaagatgccgttctggatatcgtgaaggaaacggtgtggactgttgatccggatgcgctggtgaccatcgtgggcggtttccgccgtcgcaaaacgcagggccacgacgttgacctgctgatcacgattccgggccgtcctacggatccggagctgctccacaacgtggttgatctgctcaagaagcaaggtctgctgctgtacggggacatccgtgagcgtacgttcgtggaggggcaactgccaaatcctgcgccggaccagctggacggccatcagaagtgcttcgccattctcaagctgtaccgcccgaaggtggataacagtgcggttgggacgtcgaagaaagtcgacatggctgaggttaaggattggaaagcggttcgtgtggatctggtggtcgctccagatgagcagttcgcctatgcgaaactcggttggacgggcagcggcatgtttcgtcgcgatactcgtcgctacgcggaggaagagcgcgacatgctgctcgacaaccatggtctctacgacctgaaaaagggcatttttctgagtgcggatagcgaagaagagattttcggtcatctggacctggattatctggagccgtggtatcgcaacgcg

SEQ ID NO: 6690 - protein, 394 aa, synthetic construct
  REGION 1..394: note = Variant of terminal deoxynucleotidyl transferase
MHHHHHHGGSGHPEGNTPEKEVPSVIARHVSPYACQRKTTLNNYNKKITDALEIMAENYKFKENLQARLEARRAASVLKSLPFEVTSMKDIQGLPCITDDVRPVIEEIIEVGESSRVKEILNDERYKAFKQFTSVFGVGVKTAEKWYRMGKRTLEEVKASKFLKLNKMQKAGFLYYEDLASGVTKEEKDAVLDIVKETVWTVDPDALVTIVGGFRRRKTQGHDVDLLITIPGRPTDPELLHNVVDLLKKQGLLLYGDIRERTFVEGQLPNPAPDQLDGHQKCFAILKLYRPKVDNSAVGTSKKVDMAEVKDWKAVRVDLVVAPDEQFAYAKLGWTGSGMFRRDTRRYAEEERDMLLDNHGLYDLKKGIFLSADSEEEIFGHLDLDYLEPWYRNA

SEQ ID NO: 6691 - DNA, 1182 bp, synthetic construct
  misc_feature 1..1182: note = Variant of terminal deoxynucleotidyl transferase
  source 1..1182: mol_type = other DNA
atgcaccatcatcaccatcacgggggctccggccatccggaaggtaataccccggagaaggaggtgccgagcgttatcgcccgtcatgttagtccgtacgcgtgccagcgcaagaccacgctgaataactacaacaaaaagatcaccgacgcgctggagatcatggccgagaactacaagtttaaagagaacctgcaggcgcgcctggaggcccgtcgcgccgcgagtgtcctgaaaagcctgccgttcgaggttaccagcatgaaagacatccaaggtctgccgtgcattaccgacgacgtacgtcctgtgatcgaagagatcatcgaagtaggcgagagcagccgtgttaaagaaatcctcaatgacgagcgctacaaggcgtttaagcagttcaccagcgtgttcggtgtgggcgtcaagaccgcggaaaagtggtaccgtatgggcaaacgtacgctgaaggaagtaaaggccagtaagttcctgaagctgaacaagatgcagaaggcgggcttcctgtactacgaggatctggcgagcggtgttacgaaagaagaaaaagatgccgttctggatatcgtgaaggaaacggtgtggactgttgatccggatgcgctggtgaccatcgtgggcggtttccgccgtcgcaaaacgcagggccacgacgttgacctgctgattacgattccgggccgtcctacggatccggagctgctccacaacgtggttgatctgctcaagaagcaaggtctgctgctgtacggggacatccgtgagcgtacgttcgtggaggggcaactgccaaatcctgcgccggaccagctggacggccatcagaagtgcttcgccattctcaagctgtaccgcccgaaggtggataacagtgcggttgggacgtcgaagaaagtcgacatggctgaggttaaggattggaaagcggttcgtgtggatctggtggtcgctccagatgagcagttcgcctatgcgaaactcggttggacgggcagcggcatgtttcgtcgcgatactcgtcgctacgcggaggaagagaaaaatatgctgctcgacaaccatggtctctacgacctgaaaaagggcatttttctgccggcggatagcgaagaagagattttcggtcatctggacctggattatctggagccgtggtatcgcaacgcg

SEQ ID NO: 6692 - protein, 394 aa, synthetic construct
  REGION 1..394: note = Variant of terminal deoxynucleotidyl transferase
MHHHHHHGGSGHPEGNTPEKEVPSVIARHVSPYACQRKTTLNNYNKKITDALEIMAENYKFKENLQARLEARRAASVLKSLPFEVTSMKDIQGLPCITDDVRPVIEEIIEVGESSRVKEILNDERYKAFKQFTSVFGVGVKTAEKWYRMGKRTLKEVKASKFLKLNKMQKAGFLYYEDLASGVTKEEKDAVLDIVKETVWTVDPDALVTIVGGFRRRKTQGHDVDLLITIPGRPTDPELLHNVVDLLKKQGLLLYGDIRERTFVEGQLPNPAPDQLDGHQKCFAILKLYRPKVDNSAVGTSKKVDMAEVKDWKAVRVDLVVAPDEQFAYAKLGWTGSGMFRRDTRRYAEEEKNMLLDNHGLYDLKKGIFLPADSEEEIFGHLDLDYLEPWYRNA

SEQ ID NO: 6693 - DNA, 1182 bp, synthetic construct
  misc_feature 1..1182: note = Variant of terminal deoxynucleotidyl transferase
  source 1..1182: mol_type = other DNA
atgcaccatcatcaccatcacgggggctccggccatccggaaggtaataccccggagaaggaggtgccgagcgttatcgcccgtcatgttagtccgtacgcgtgccagcgcaagaccacgctgaataactacaacaaaaagatcaccgacgcgctggagatcatggccgagaactacaagtttaaagagaacctgcaggcgcgcctggaggcccgtcgcgccgcgagtgtcctgaaaagcctgccgttcgaggttaccagcatgaaagacatccaaggtctgccgtgcattaccgacgacgtacgtcctgtgatcgaagagatcatcgaagtaggcgagagcagccgtgttaaagaaatcctcaatgacgagcgctacaaggcctttaagcagttcaccagcgtgttcggtgtgggcgtcaagaccgcggaaaagtggtaccgtatgggcaaacgtacgctgaaggaagtaaaggccagtaagttcctgaagctgaacaagatgcagaaggcgggcttcctgtactacgaggatctggcgagcggtgttacgaaagaagaaaaagatgccgttctggatatcgtgaaggaaacggtgtggactgttgatccggatgcgctggtgaccatcgtgggcggtttccgccgtcgcaaaccgcagggccacgacgttgacctgctgatcacgattccgggccgtcctacggatccggagctgctccacaacgtggttgatctgctcaagaagcaaggtctgctgctgtacggggacatccgtgagcgtacgttcgtggaggggcaactgccaaatcctgcgccggaccagctggacggccatcagaagtgcttcgccattctcaagctgtaccgcccgaaggtggataacagtgcggttgggacgtcgaagaaagtcgacatggctgaggttaaggattggaaagcggttcgtgtggatctggtggtcgctccagatgagcagttcgcctatgcgaaactcggttggacgggcagcggcatgtttcgtcgcgatactcgtcgctacgcggaggaagagaaaaatatgctgctcgacaaccatggtctctacgacctgaaaaagggcatttttctgagtgcggatagcgaagaagagattttcggtcatctggacctggattatctggagccgtggtatcgcaacgcg

SEQ ID NO: 6694 - protein, 394 aa, synthetic construct
  REGION 1..394: note = Variant of terminal deoxynucleotidyl transferase
MHHHHHHGGSGHPEGNTPEKEVPSVIARHVSPYACQRKTTLNNYNKKITDALEIMAENYKFKENLQARLEARRAASVLKSLPFEVTSMKDIQGLPCITDDVRPVIEEIIEVGESSRVKEILNDERYKAFKQFTSVFGVGVKTAEKWYRMGKRTLKEVKASKFLKLNKMQKAGFLYYEDLASGVTKEEKDAVLDIVKETVWTVDPDALVTIVGGFRRRKPQGHDVDLLITIPGRPTDPELLHNVVDLLKKQGLLLYGDIRERTFVEGQLPNPAPDQLDGHQKCFAILKLYRPKVDNSAVGTSKKVDMAEVKDWKAVRVDLVVAPDEQFAYAKLGWTGSGMFRRDTRRYAEEEKNMLLDNHGLYDLKKGIFLSADSEEEIFGHLDLDYLEPWYRNA

SEQ ID NO: 6695 - DNA, 1182 bp, synthetic construct
  misc_feature 1..1182: note = Variant of terminal deoxynucleotidyl transferase
  source 1..1182: mol_type = other DNA
atgcaccatcatcaccatcacgggggctccggccatccggaaggtaataccccggagaaggaggtgccgagcgttatcgcccgtcatgttagtccgtacgcgtgccagcgcaagaccacgctgaataactacaacaaaaagatcaccgacgcgctggagatcatggccgagaactacaagtttaaagagaacctgcaggcgcgcctggaggcccgtcgcgccgcgagtgtcctgaaaagcctgccgttcgaggttaccagcatgaaagacatccaaggtctgccgtgcattaccgacgacgtacgtcctgtgatcgaagagatcatcgaagtaggcgagagcagccgtgttaaagaaatcctcaatgacgagcgctacaaggcgtttaagcagttcaccagcgtgttcggtgtgggcgtcaagaccgcggaaaagtggtaccgtatgggcctgcgtacgctgaaggaagtaaaggccagtaagttcctgaagctgaacaagatgcagaaggcgggcttcctgtactacgaggatctggcgagcggtgttacgaaagaagaaaaagatgccgttctggatatcgtgaaggaaacggtgtggactgttgatccggatgcgctggtgaccatcgtgggcggtttccgccgtcgcaaaccgcagggccacgacgttgacctgctgatcacgattccgggccgtcctacggatccggagctgctccacaacgtggttgatctgctcaagaagcaaggtctgctgctgtacggggacatccgtgagcgtacgttcgtggaggggcaactgccaaatcctgcgccggaccagctggacggccatcagaagtgcttcgccattctcaagctgtaccgcccgaaggtggataacagtgcggttgggacgtcgaagaaagtcgacatggctgaggttaaggattggaaagcggttcgtgtggatctggtggtcgctccagatgagcagttcgcctatgcgaaactcggttggacgggcagcggcatgtttcgtcgcgatactcgtcgctacgcggaggaagagcgcgacatgctgctcgacaaccatggtctctacgacctgaaaaagggcatttttctgccggcgacgagcgaagaagagattttcggtcatctggacctggattatctggagccgtggtatcgcaacgcg

SEQ ID NO: 6696 - protein, 394 aa, synthetic construct
  REGION 1..394: note = Variant of terminal deoxynucleotidyl transferase
MHHHHHHGGSGHPEGNTPEKEVPSVIARHVSPYACQRKTTLNNYNKKITDALEIMAENYKFKENLQARLEARRAASVLKSLPFEVTSMKDIQGLPCITDDVRPVIEEIIEVGESSRVKEILNDERYKAFKQFTSVFGVGVKTAEKWYRMGLRTLKEVKASKFLKLNKMQKAGFLYYEDLASGVTKEEKDAVLDIVKETVWTVDPDALVTIVGGFRRRKPQGHDVDLLITIPGRPTDPELLHNVVDLLKKQGLLLYGDIRERTFVEGQLPNPAPDQLDGHQKCFAILKLYRPKVDNSAVGTSKKVDMAEVKDWKAVRVDLVVAPDEQFAYAKLGWTGSGMFRRDTRRYAEEERDMLLDNHGLYDLKKGIFLPATSEEEIFGHLDLDYLEPWYRNA

SEQ ID NO: 6697 - DNA, 1182 bp, synthetic construct
  misc_feature 1..1182: note = Variant of terminal deoxynucleotidyl transferase
  source 1..1182: mol_type = other DNA
atgcaccatcatcaccatcacgggggctccggccatccggaaggtaataccccggagaaggaggtgccgagcgttatcgcccgtcatgttagtccgtacgcgtgccagcgcaagaccacgctgaataactacaacaaaaagatcaccgacgcgctggagatcatggccgagaactacaagtttaaagagaacctgcaggcgcgcctggaggcccgtcgcgccgcgagtgtcctgaaaagcctgccgttcgaggttaccagcatgaaagacatccaaggtctgccgtgcattaccgacgacgtacgtcctgtgatcgaagagatcatcgaagtaggcgagagcagccgtgttaaagaaatcctcaatgacgagcgctacaaggcgtttaagcagttcaccagcgtgttcggtgtgggcgtcaagaccgcggaaaagtggtaccgtatgggcctgcgtacgctgaaggaagtaaaggccagtaagttcctgaagctgaacaagatgcagaaggcgggcttcctgtactacgaggatctggcgagcggtgttacgaaagaagaaaaagatgccgttctggatatcgtgaaggaaacggtgtggactgttgatccggatgcgctggtgaccatcgtgggcggtttccgccgtcgcaaaccacagggccacgacgttgacctgctgatcacgattccgggccgtcctacggatccggagctgctccacaacgtggttgatctgctcaagaagcaaggtctgctgctgtacggggacatccgtgagcgtacgttcgtggaggggcaactgccaaatcctgcgccggaccagctggacggccatcagaagtgcttcgccattctcaagctgtaccgcccgaaggtggataacagtgcggttgggacgtcgaagaaagtcgacatggctgaggttaaggattggaaagcggttcgtgtggatctggtggtcgctccagatgagcagttcgcctatgcgaaactcggttggacgggcagcggcatgtttcgtcgcgatactcgtcgctacgcggaggaagagcgcgacatgctgctcgacaaccatggtctctacgacctgaaaaagggcatttttctgagtgcgacgagcgaagaagagattttcggtcatctggacctggattatctggagccgtggtatcgcaacgcg

SEQ ID NO: 6698 - protein, 394 aa, synthetic construct
  REGION 1..394: note = Variant of terminal deoxynucleotidyl transferase
MHHHHHHGGSGHPEGNTPEKEVPSVIARHVSPYACQRKTTLNNYNKKITDALEIMAENYKFKENLQARLEARRAASVLKSLPFEVTSMKDIQGLPCITDDVRPVIEEIIEVGESSRVKEILNDERYKAFKQFTSVFGVGVKTAEKWYRMGLRTLKEVKASKFLKLNKMQKAGFLYYEDLASGVTKEEKDAVLDIVKETVWTVDPDALVTIVGGFRRRKPQGHDVDLLITIPGRPTDPELLHNVVDLLKKQGLLLYGDIRERTFVEGQLPNPAPDQLDGHQKCFAILKLYRPKVDNSAVGTSKKVDMAEVKDWKAVRVDLVVAPDEQFAYAKLGWTGSGMFRRDTRRYAEEERDMLLDNHGLYDLKKGIFLSATSEEEIFGHLDLDYLEPWYRNA

SEQ ID NO: 6699 - DNA, 1182 bp, synthetic construct
  misc_feature 1..1182: note = Variant of terminal deoxynucleotidyl transferase
  source 1..1182: mol_type = other DNA
atgcaccatcatcaccatcacgggggctccggccatccggaaggtaataccccggagaaggaggtgccgagcgttatcgcccgtcatgttagtccgtacgcgtgccagcgcaagaccacgctgaataactacaacaaaaagatcaccgacgcgctggagatcatggccgagaactacaagtttaaagagaacctgcaggcgcgcctggaggcccgtcgcgccgcgagtgtcctgaaaagcctgccgttcgaggttaccagcatgaaagacatccaaggtctgccgtgcattaccgacgacgtacgtcctgtgatcgaagagatcatcgaagtaggcgagagcagccgtgttaaagaaatcctcaatgacgagcgctacaaggcgtttaagcagttcaccagcgtgttcggtgtgggcgtcaagaccgcggaaaagtggtaccgtatgggcaaacgtacgctggaggaagtaaaggccagtaagttcctgaagctgaacaagatgcagaaggcgggcttcctgtactacgaggatctggcgagcggtgttacgaaagaagaaaaagatgccgttctggatatcgtgaaggaaacggtgtggactgttgatccggatgcgctggtgaccatcgtgggcggtttccgccgtcgcaaaccacagggccacgacgttgacctgctgatcacgattccgggccgtcctacggatccggagctgctccacaacgtggttgatctgctcaagaagcaaggtctgctgctgtacggggacatccgtgagcgtacgttcgtggaggggcaactgccaaatcctgcgccggaccagctggacggccatcagaagtgcttcgccattctcaagctgtaccgcccgaaggtggataacagtgcggttgggacgtcgaagaaagtcgacatggctgaggttaaggattggaaagcggttcgtgtggatctggtggtcgctccagatgagcagttcgcctatgcgaaactcggttggacgggcagcggcatgtttcgtcgcgatactcgtcgctacgcggaggaagagcgcgacatgctgctcgacaaccatggtctctacgacctgaaaaagggcatttttctgccggcggatagcgaagaagagattttcggtcatctggacctggattatctggagccgtggtatcgcaacgcg

SEQ ID NO: 6700 - protein, 394 aa, synthetic construct
  REGION 1..394: note = Variant of terminal deoxynucleotidyl transferase
MHHHHHHGGSGHPEGNTPEKEVPSVIARHVSPYACQRKTTLNNYNKKITDALEIMAENYKFKENLQARLEARRAASVLKSLPFEVTSMKDIQGLPCITDDVRPVIEEIIEVGESSRVKEILNDERYKAFKQFTSVFGVGVKTAEKWYRMGKRTLEEVKASKFLKLNKMQKAGFLYYEDLASGVTKEEKDAVLDIVKETVWTVDPDALVTIVGGFRRRKPQGHDVDLLITIPGRPTDPELLHNVVDLLKKQGLLLYGDIRERTFVEGQLPNPAPDQLDGHQKCFAILKLYRPKVDNSAVGTSKKVDMAEVKDWKAVRVDLVVAPDEQFAYAKLGWTGSGMFRRDTRRYAEEERDMLLDNHGLYDLKKGIFLPADSEEEIFGHLDLDYLEPWYRNA

SEQ ID NO: 6701 - DNA, 1182 bp, synthetic construct
  misc_feature 1..1182: note = Variant of terminal deoxynucleotidyl transferase
  source 1..1182: mol_type = other DNA
atgcaccatcatcaccatcacgggggctccggccatccggaaggtaataccccggagaaggaggtgccgagcgttatcgcccgtcatgttagtccgtacgcgtgccagcgcaagaccacgctgaataactacaacaaaaagatcaccgacgcgctggagatcatggccgagaactacaagtttaaagagaacatgcaggcgcgcctggaggcccgtcgcgccgcgagtgtcctgaaaagcctgccgttcgaggttaccagcatgaaagacatccaaggtctgccgtgcattaccgacgacgtacgtcctgtgatcgaagagatcatcgaagtaggcgagagcagccgtgttaaagaaatcctcaatgacgagcgctacaagaaatttaagcagttcaccagcgtgttcggtgtgggcgtcaagaccgcggaaaagtggtaccgtatgggcctccgtacgctggaggaagtaaaggccagtaagttcctgaagctgaacaagatgcagaaggcgggcttcctgtactacgaggatctggcgagcggtgttacgaaagaagaaaaagatgccgttctggatatcgtgaaggaaacggtgtggactgttgatccggatgcgctggtgaccatcgtgggcggtttccgccgtcgcaaaccgcagggccacgacgttgacctgctgatcacgattccgggccgtcctacggatccggagctgctccacaacgtggttgatctgctcaagaagcaaggtctgctgctgtacggggacatccgtgagcgtacgttcgtggaggggcaactgccaaatcctgcgccggaccagctggacggccatcagaagtgcttcgccattctcaagctgtaccgcccgaaggtggataacagtgcggttgggacgtcgaagaaagtcgacatggctgaggttaaggattggaaagcggttcgtgtggatctggtggtcgctccagatgagcagttcgcctatgcgaaactcggttggacgggcagcggcatgtttcgtcgcgatactcgtcgctacgcggaggaagagcgcgacatgctgctcgacaaccatggtctctacgacctgaaaaagggcatttttctgagtgcgacgagcgaagaagagattttcggtcatctggacctggattatctggagccgtggtatcgcaacgcg

SEQ ID NO: 6702 - protein, 394 aa, synthetic construct
  REGION 1..394: note = Variant of terminal deoxynucleotidyl transferase
MHHHHHHGGSGHPEGNTPEKEVPSVIARHVSPYACQRKTTLNNYNKKITDALEIMAENYKFKENMQARLEARRAASVLKSLPFEVTSMKDIQGLPCITDDVRPVIEEIIEVGESSRVKEILNDERYKKFKQFTSVFGVGVKTAEKWYRMGLRTLEEVKASKFLKLNKMQKAGFLYYEDLASGVTKEEKDAVLDIVKETVWTVDPDALVTIVGGFRRRKPQGHDVDLLITIPGRPTDPELLHNVVDLLKKQGLLLYGDIRERTFVEGQLPNPAPDQLDGHQKCFAILKLYRPKVDNSAVGTSKKVDMAEVKDWKAVRVDLVVAPDEQFAYAKLGWTGSGMFRRDTRRYAEEERDMLLDNHGLYDLKKGIFLSATSEEEIFGHLDLDYLEPWYRNA

SEQ ID NO: 6703 - DNA, 1182 bp, synthetic construct
  misc_feature 1..1182: note = Variant of terminal deoxynucleotidyl transferase
  source 1..1182: mol_type = other DNA
atgcaccatcatcaccatcacgggggctccggccatccggaaggtaataccccggagaaggaggtgccgagcgttatcgcccgtcatgttagtccgtacgcgtgccagcgcaagaccacgctgaataactacaacaaaaagatcaccgacgcgctggagatcatggccgagaactacaagtttaaagagaacatgcaggcgcgcctggaggcccgtcgcgccgcgagtgtcctgaaaagcctgccgttcgaggttaccagcatgaaagacatccaaggtctgccgtgcattaccgacgacgtacgtcctgtgatcgaagagatcatcgaagtaggcgagagcagccgtgttaaagaaatcctcaatgacgagcgctacaagaaatttaagcagttcaccagcgtgttcggtgtgggcgtcaagaccgcggaaaagtggtaccgtatgggcctccgtacgctggaagaagtaaaggccagtaagttcctgaagctgaacaagatgcagaaggcgggcttcctgtactacgaggatctggcgagcggtgttacgaaagaagaaaaagatgccgttctggatatcgtgaaggaaacggtgtggactgttgatccggatgcgctggtggaaatcgtgggcggtttccgccgtcgcaaaccacagggccacgacgttgacctgctgattacgattccgggccgtcctacggatccggagctgctccacaacgtggttgatctgctcaagaagcaaggtctgctgctgtacggggacatccgtgagcgtacgttcgtggaggggcaactgccaaatcctgcgccggaccagctggacggccatcagaagtgcttcgccattctcaagctgtaccgcccgaaggtggataacagtgcggttgggacgtcgaagaaagtcgacatggctgaggttaaggattggaaagcggttcgtgtggatctggtggtcgctccagatgagcagttcgcctatgcgaaactcggttggacgggcagcggcatgtttcgtcgcgatactcgtcgctacgcggaggaagagcgcgacatgctgctcgacaaccatggtctctacgacctgaaaaagggcatttttctgccggcggatagcgaagaagagattttcggtcatctggacctggattatctggagccgtggtatcgcaacgcg

SEQ ID NO: 6704 - protein, 394 aa, synthetic construct
  REGION 1..394: note = Variant of terminal deoxynucleotidyl transferase
MHHHHHHGGSGHPEGNTPEKEVPSVIARHVSPYACQRKTTLNNYNKKITDALEIMAENYKFKENMQARLEARRAASVLKSLPFEVTSMKDIQGLPCITDDVRPVIEEIIEVGESSRVKEILNDERYKKFKQFTSVFGVGVKTAEKWYRMGLRTLEEVKASKFLKLNKMQKAGFLYYEDLASGVTKEEKDAVLDIVKETVWTVDPDALVEIVGGFRRRKPQGHDVDLLITIPGRPTDPELLHNVVDLLKKQGLLLYGDIRERTFVEGQLPNPAPDQLDGHQKCFAILKLYRPKVDNSAVGTSKKVDMAEVKDWKAVRVDLVVAPDEQFAYAKLGWTGSGMFRRDTRRYAEEERDMLLDNHGLYDLKKGIFLPADSEEEIFGHLDLDYLEPWYRNA

SEQ ID NO: 6705 - DNA, 1182 bp, synthetic construct
  misc_feature 1..1182: note = Variant of terminal deoxynucleotidyl transferase
  source 1..1182: mol_type = other DNA
atgcaccatcatcaccatcacgggggctccggccatccggaaggtaataccccggagaaggaggtgccgagcgttatcgcccgtcatgttagtccgtacgcgtgccagcgcaagaccacgctgaataactacaacaaaaagatcaccgacgcgctggagatcatggccgagaactacaagtttaaagagaacctgcaggcgcgcctggaggcccgtcgcgccgcgagtgtcctgaaaagcctgccgttcgaggttaccagcatgaaagacatccaaggtctgccgtgcattaccgacgacgtacgtcctgtgatcgaagagatcatcgaagtaggcgagagcagccgtgttaaagaaatcctcaatgacgagcgctacaaggcctttaagcagttcaccagcgtgttcggtgtgggcgtcaagaccgcggaaaagtggtaccgtatgggcctgcgtacgctggaggaagtaaaggccagtaagttcctgaagctgaacaagatgcagaaggcgggcttcctgtactacgaggatctggcgagcggtgttacgaaagaagaaaaagatgccgttctggatatcgtgaaggaaacggtgtggactgttgatccggatgcgctggtgaccatcgtgggcggtttccgccgtcgcaaaccacagggccacgacgttgacctgctgattacgattccgggccgtcctacggatccggagctgctccacaacgtggttgatctgctcaagaagcaaggtctgctgctgtacggggacatccgtgagcgtacgttcgtggaggggcaactgccaaatcctgcgccggaccagctggacggccatcagaagtgcttcgccattctcaagctgtaccgcccgaaggtggataacagtgcggttgggacgtcgaagaaagtcgacatggctgaggttaaggattggaaagcggttcgtgtggatctggtggtcgctccagatgagcagttcgcctatgcgaaactcggttggacgggcagcggcatgtttcgtcgcgatactcgtcgctacgcggaggaagagcgcgacatgctgctcgacaaccatggtctctacgacctgaaaaagggcatttttctgagtgcgacgagcgaagaagagattttcggtcatctggacctggattatctggagccgtggtatcgcaacgcg

SEQ ID NO: 6706 - protein, 394 aa, synthetic construct; identical to SEQ ID NO: 6596
  REGION 1..394: note = Variant of terminal deoxynucleotidyl transferase

SEQ ID NO: 6707 - DNA, 1182 bp, synthetic construct
  misc_feature 1..1182: note = Variant of terminal deoxynucleotidyl transferase
  source 1..1182: mol_type = other DNA
atgcaccatcatcaccatcacgggggctccggccatccggaaggtaataccccggagaaggaggtgccgagcgttatcgcccgtcatgttagtccgtacgcgtgccagcgcaagaccacgctgaataactacaacaaaaagatcaccgacgcgctggagatcatggccgagaactacaagtttaaagagaacctgcaggcgcgcctggaggcccgtcgcgccgcgagtgtcctgaaaagcctgccgttcgaggttaccagcatgaaagacatccaaggtctgccgtgcattaccgacgacgtacgtcctgtgatcgaagagatcatcgaagtaggcgagagcagccgtgttaaagaaatcctcaatgacgagcgctacaaggcgtttaagcagttcaccagcgtgttcggtgtgggcgtcaagaccgcggaaaagtggtaccgtatgggcctccgtacgctggaagaagtaaaggccagtaagttcctgaagctgaacaagatgcagaaggcgggcttcctgtactacgaggatctggcgagcggtgttacgaaagaagaaaaagatgccgttctggatatcgtgaaggaaacggtgtggactgttgatccggatgcgctggtgaccatcgtgggcggtttccgccgtcgcaaaacgcagggccacgacgttgacctgctgatcacgattccgggccgtcctacggatccggagctgctccacaacgtggttgatctgctcaagaagcaaggtctgctgctgtacggggacatccgtgagcgtacgttcgtggaggggcaactgccaaatcctgcgccggaccagctggacggccatcagaagtgcttcgccattctcaagctgtaccgcccgaaggtggataacagtgcggttgggacgtcgaagaaagtcgacatggctgaggttaaggattggaaagcggttcgtgtggatctggtggtcgctccagatgagcagttcgcctatgcgaaactcggttggacgggcagcggcatgtttcgtcgcgatactcgtcgctacgcggaggaagagcgcgacatgctgctcgacaaccatggtctctacgacctgaaaaagggcatttttctgccggcggatagcgaagaagagattttcggtcatctggacctggattatctggagccgtggtatcgcaacgcg

SEQ ID NO: 6708 - protein, 394 aa, synthetic construct
  REGION 1..394: note = Variant of terminal deoxynucleotidyl transferase
MHHHHHHGGSGHPEGNTPEKEVPSVIARHVSPYACQRKTTLNNYNKKITDALEIMAENYKFKENLQARLEARRAASVLKSLPFEVTSMKDIQGLPCITDDVRPVIEEIIEVGESSRVKEILNDERYKAFKQFTSVFGVGVKTAEKWYRMGLRTLEEVKASKFLKLNKMQKAGFLYYEDLASGVTKEEKDAVLDIVKETVWTVDPDALVTIVGGFRRRKTQGHDVDLLITIPGRPTDPELLHNVVDLLKKQGLLLYGDIRERTFVEGQLPNPAPDQLDGHQKCFAILKLYRPKVDNSAVGTSKKVDMAEVKDWKAVRVDLVVAPDEQFAYAKLGWTGSGMFRRDTRRYAEEERDMLLDNHGLYDLKKGIFLPADSEEEIFGHLDLDYLEPWYRNA

SEQ ID NO: 6709 - DNA, 1182 bp, synthetic construct
  misc_feature 1..1182: note = Variant of terminal deoxynucleotidyl transferase
  source 1..1182: mol_type = other DNA
atgcaccatcatcaccatcacgggggctccggccatccggaaggtaataccccggagaaggaggtgccgagcgttatcgcccgtcatgttagtccgtacgcgtgccagcgcaagaccacgctgaataactacaacaaaaagatcaccgacgcgctggagatcatggccgagaactacaagtttaaagagaacatgcaggcgcgcctggaggcccgtcgcgccgcgagtgtcctgaaaagcctgccgttcgaggttaccagcatgaaagacatccaaggtctgccgtgcattaccgacgacgtacgtcctgtgatcgaagagatcatcgaagtaggcgagagcagccgtgttaaagaaatcctcaatgacgagcgctacaagaaatttaagcagttcaccagcgtgttcggtgtgggcgtcaagaccgcggaaaagtggtaccgtatgggcctccgtacgctggaagaagtaaaggccagtaagttcctgaagctgaacaagatgcagaaggcgggcttcctgtactacgaggatctggcgagcggtgttacgaaagaagaaaaagatgccgttctggatatcgtgaaggaaacggtgtggactgttgatccggatgcgctggtgaccatcgtgggcggtttccgccgtcgcaaaccgcagggccacgacgttgacctgctgatcacgattccgggccgtcctacggatccggagctgctccacaacgtggttgatctgctcaagaagcaaggtctgctgctgtacggggacatccgtgagcgtacgttcgtggaggggcaactgccaaatcctgcgccggaccagctggacggccatcagaagtgcttcgccattctcaagctgtaccgcccgaaggtggataacagtgcggttgggacgtcgaagaaagtcgacatggctgaggttaaggattggaaagcggttcgtgtggatctggtggtcgctccagatgagcagttcgcctatgcgaaactcggttggacgggcagcggcatgtttcgtcgcgatactcgtcgctacgcggaggaagagcgcgacatgctgctcgacaaccatggtctctacgacctgaaaaagggcatttttctgagtgcggacagcgaagaagagattttcggtcatctggacctggattatctggagccgtggtatcgcaacgcg

SEQ ID NO: 6710 - protein, 394 aa, synthetic construct
  REGION 1..394: note = Variant of terminal deoxynucleotidyl transferase
MHHHHHHGGSGHPEGNTPEKEVPSVIARHVSPYACQRKTTLNNYNKKITDALEIMAENYKFKENMQARLEARRAASVLKSLPFEVTSMKDIQGLPCITDDVRPVIEEIIEVGESSRVKEILNDERYKKFKQFTSVFGVGVKTAEKWYRMGLRTLEEVKASKFLKLNKMQKAGFLYYEDLASGVTKEEKDAVLDIVKETVWTVDPDALVTIVGGFRRRKPQGHDVDLLITIPGRPTDPELLHNVVDLLKKQGLLLYGDIRERTFVEGQLPNPAPDQLDGHQKCFAILKLYRPKVDNSAVGTSKKVDMAEVKDWKAVRVDLVVAPDEQFAYAKLGWTGSGMFRRDTRRYAEEERDMLLDNHGLYDLKKGIFLSADSEEEIFGHLDLDYLEPWYRNA

SEQ ID NO: 6711 - DNA, 1182 bp, synthetic construct
  misc_feature 1..1182: note = Variant of terminal deoxynucleotidyl transferase
  source 1..1182: mol_type = other DNA
atgcaccatcatcaccatcacgggggctccggccatccggaaggtaataccccggagaaggaggtgccgagcgttatcgcccgtcatgttagtccgtacgcgtgccagcgcaagaccacgctgaataactacaacaaaaagatcaccgacgcgctggagatcatggccgagaactacaagtttaaagagaacctgcaggcgcgcctggaggcccgtcgcgccgcgagtgtcctgaaaagcctgccgttcgaggttaccagcatgaaagacatccaaggtctgccgtgcattaccgacgacgtacgtcctgtgatcgaagagatcatcgaagtaggcgagagcagccgtgttaaagaaatcctcaatgacgagcgctacaaggcgtttaagcagttcaccagcgtgttcggtgtgggcgtcaagaccgcggaaaagtggtaccgtatgggcctccgtacgctggaagaagtaaaggcaagtaagttcctgaagctgaacaagatgcagaaggcgggcttcctgtactacgaggatctggcgagcggtgttacgaaagaagaaaaagatgccgttctggatatcgtgaaggaaacggtgtggactgttgatccggatgcgctggtggaaatcgtgggcggtttccgccgtcgcaaaccacagggccacgacgttgacctgctgatcacgattccgggccgtcctacggatccggagctgctccacaacgtggttgatctgctcaagaagcaaggtctgctgctgtacggggacatccgtgagcgtacgttcgtggaggggcaactgccaaatcctgcgccggaccagctggacggccatcagaagtgcttcgccattctcaagctgtaccgcccgaaggtggataacagtgcggttgggacgtcgaagaaagtcgacatggctgaggttaaggattggaaagcggttcgtgtggatctggtggtcgctccagatgagcagttcgcctatgcgaaactcggttggacgggcagcggcatgtttcgtcgcgatactcgtcgctacgcggaggaagagcgcgacatgctgctcgacaaccatggtctctacgacctgaaaaagggcatttttctgagtgcggatagcgaagaagagattttcggtcatctggacctggattatctggagccgtggtatcgcaacgcg

SEQ ID NO: 6712 - protein, 394 aa, synthetic construct; identical to SEQ ID NO: 6536
  REGION 1..394: note = Variant of terminal deoxynucleotidyl transferase

SEQ ID NO: 6713 - DNA, 1182 bp, synthetic construct
  misc_feature 1..1182: note = Variant of terminal deoxynucleotidyl transferase
  source 1..1182: mol_type = other DNA
atgcaccatcatcaccatcacgggggctccggccatccggaaggtaataccccggagaaggaggtgccgagcgttatcgcccgtcatgttagtccgtacgcgtgccagcgcaagaccacgctgaataactacaacaaaaagatcaccgacgcgctggagatcatggccgagaactacaagtttaaagagaacatgcaggcgcgcctggaggcccgtcgcgccgcgagtgtcctgaaaagcctgccgttcgaggttaccagcatgaaagacatccaaggtctgccgtgcattaccgacgacgtacgtcctgtgatcgaagagatcatcgaagtaggcgagagcagccgtgttaaagaaatcctcaatgacgagcgctacaagaaatttaagcagttcaccagcgtgttcggtgtgggcgtcaagaccgcggaaaagtggtaccgtatgggcctgcgtacgctgaaggaagtaaaggccagtaagttcctgaagctgaacaagatgcagaaggcgggcttcctgtactacgaggatctggcgagcggtgttacgaaagaagaaaaagatgccgttctggatatcgtgaaggaaacggtgtggactgttgatccggatgcgctggtggaaatcgtgggcggtttccgccgtcgcaaaccacagggccacgacgttgacctgctgatcacgattccgggccgtcctacggatccggagctgctccacaacgtggttgatctgctcaagaagcaaggtctgctgctgtacggggacatccgtgagcgtacgttcgtggaggggcaactgccaaatcctgcgccggaccagctggacggccatcagaagtgcttcgccattctcaagctgtaccgcccgaaggtggataacagtgcggttgggacgtcgaagaaagtcgacatggctgaggttaaggattggaaagcggttcgtgtggatctggtggtcgctccagatgagcagttcgcctatgcgaaactcggttggacgggcagcggcatgtttcgtcgcgatactcgtcgctacgcggaggaagagcgcgacatgctgctcgacaaccatggtctctacgacctgaaaaagggcatttttctgccggcggatagcgaagaagagattttcggtcatctggacctggattatctggagccgtggtatcgcaacgcg

SEQ ID NO: 6714 - protein, 394 aa, synthetic construct
  REGION 1..394: note = Variant of terminal deoxynucleotidyl transferase
MHHHHHHGGSGHPEGNTPEKEVPSVIARHVSPYACQRKTTLNNYNKKITDALEIMAENYKFKENMQARLEARRAASVLKSLPFEVTSMKDIQGLPCITDDVRPVIEEIIEVGESSRVKEILNDERYKKFKQFTSVFGVGVKTAEKWYRMGLRTLKEVKASKFLKLNKMQKAGFLYYEDLASGVTKEEKDAVLDIVKETVWTVDPDALVEIVGGFRRRKPQGHDVDLLITIPGRPTDPELLHNVVDLLKKQGLLLYGDIRERTFVEGQLPNPAPDQLDGHQKCFAILKLYRPKVDNSAVGTSKKVDMAEVKDWKAVRVDLVVAPDEQFAYAKLGWTGSGMFRRDTRRYAEEERDMLLDNHGLYDLKKGIFLPADSEEEIFGHLDLDYLEPWYRNA

SEQ ID NO: 6715 - DNA, 1182 bp, synthetic construct
  misc_feature 1..1182: note = Variant of terminal deoxynucleotidyl transferase
  source 1..1182: mol_type = other DNA
atgcaccatcatcaccatcacgggggctccggccatccggaaggtaataccccggagaaggaggtgccgagcgttatcgcccgtcatgttagtccgtacgcgtgccagcgcaagaccacgctgaataactacaacaaaaagatcaccgacgcgctggagatcatggccgagaactacaagtttaaagagaacctgcaggcgcgcctggaggcccgtcgcgccgcgagtgtcctgaaaagcctgccgttcgaggttaccagcatgaaagacatccaaggtctgccgtgcattaccgacgacgtacgtcctgtgatcgaagagatcatcgaagtaggcgagagcagccgtgttaaagaaatcctcaatgacgagcgctacaaggcgtttaagcagttcaccagcgtgttcggtgtgggcgtcaagaccgcggaaaagtggtaccgtatgggcaaacgtacgctgaaggaagtaaaggccagtaagttcctgaagctgaacaagatgcagaaggcgggcttcctgtactacgaggatctggcgagcggtgttacgaaagaagaaaaagatgccgttctggatatcgtgaaggaaacggtgtggactgttgatccggatgcgctggtgaccatcgtgggcggtttccgccgtcgcaaaccgcagggccacgacgttgacctgctgattacgattccgggccgtcctacggatccggagctgctccacaacgtggttgatctgctcaagaagcaaggtctgctgctgtacggggacatccgtgagcgtacgttcgtggaggggcaactgccaaatcctgcgccggaccagctggacggccatcagaagtgcttcgccattctcaagctgtaccgcccgaaggtggataacagtgcggttgggacgtcgaagaaagtcgacatggctgaggttaaggattggaaagcggttcgtgtggatctggtggtcgctccagatgagcagttcgcctatgcgaaactcggttggacgggcagcggcatgtttcgtcgcgatactcgtcgctacgcggaggaagagaaaaatatgctgctcgacaaccatggtctctacgacctgaaaaagggcatttttctgagtgcgacgagcgaagaagagattttcggtcatctggacctggattatctggagccgtggtatcgcaacgcg

SEQ ID NO: 6716 - protein, 394 aa, synthetic construct
  REGION 1..394: note = Variant of terminal deoxynucleotidyl transferase
MHHHHHHGGSGHPEGNTPEKEVPSVIARHVSPYACQRKTTLNNYNKKITDALEIMAENYKFKENLQARLEARRAASVLKSLPFEVTSMKDIQGLPCITDDVRPVIEEIIEVGESSRVKEILNDERYKAFKQFTSVFGVGVKTAEKWYRMGKRTLKEVKASKFLKLNKMQKAGFLYYEDLASGVTKEEKDAVLDIVKETVWTVDPDALVTIVGGFRRRKPQGHDVDLLITIPGRPTDPELLHNVVDLLKKQGLLLYGDIRERTFVEGQLPNPAPDQLDGHQKCFAILKLYRPKVDNSAVGTSKKVDMAEVKDWKAVRVDLVVAPDEQFAYAKLGWTGSGMFRRDTRRYAEEEKNMLLDNHGLYDLKKGIFLSATSEEEIFGHLDLDYLEPWYRNA

SEQ ID NO: 6717 - DNA, 1182 bp, synthetic construct
  misc_feature 1..1182: note = Variant of terminal deoxynucleotidyl transferase
  source 1..1182: mol_type = other DNA
atgcaccatcatcaccatcacgggggctccggccatccggaaggtaataccccggagaaggaggtgccgagcgttatcgcccgtcatgttagtccgtacgcgtgccagcgcaagaccacgctgaataactacaacaaaaagatcaccgacgcgctggagatcatggccgagaactacaagtttaaagagaacatgcaggcgcgcctggaggcccgtcgcgccgcgagtgtcctgaaaagcctgccgttcgaggttaccagcatgaaagacatccaaggtctgccgtgcattaccgacgacgtacgtcctgtgatcgaagagatcatcgaagtaggcgagagcagccgtgttaaagaaatcctcaatgacgagcgctacaaggcgtttaagcagttcaccagcgtgttcggtgtgggcgtcaagaccgcggaaaagtggtaccgtatgggcctgcgtacgctggaggaagtaaaggccagtaagttcctgaagctgaacaagatgcagaaggcgggcttcctgtactacgaggatctggcgagcggtgttacgaaagaagaaaaagatgccgttctggatatcgtgaaggaaacggtgtggactgttgatccggatgcgctggtgaccatcgtgggcggtttccgccgtcgcaaaccacagggccacgacgttgacctgctgatcacgattccgggccgtcctacggatccggagctgctccacaacgtggttgatctgctcaagaagcaaggtctgctgctgtacggggacatccgtgagcgtacgttcgtggaggggcaactgccaaatcctgcgccggaccagctggacggccatcagaagtgcttcgccattctcaagctgtaccgcccgaaggtggataacagtgcggttgggacgtcgaagaaagtcgacatggctgaggttaaggattggaaagcggttcgtgtggatctggtggtcgctccagatgagcagttcgcctatgcgaaactcggttggacgggcagcggcatgtttcgtcgcgatactcgtcgctacgcggaggaagagaaaaatatgctgctcgacaaccatggtctctacgacctgaaaaagggcatttttctgagtgcggatagcgaagaagagattttcggtcatctggacctggattatctggagccgtggtatcgcaacgcg

SEQ ID NO: 6718 - protein, 394 aa, synthetic construct
  REGION 1..394: note = Variant of terminal deoxynucleotidyl transferase
MHHHHHHGGSGHPEGNTPEKEVPSVIARHVSPYACQRKTTLNNYNKKITDALEIMAENYKFKENMQARLEARRAASVLKSLPFEVTSMKDIQGLPCITDDVRPVIEEIIEVGESSRVKEILNDERYKAFKQFTSVFGVGVKTAEKWYRMGLRTLEEVKASKFLKLNKMQKAGFLYYEDLASGVTKEEKDAVLDIVKETVWTVDPDALVTIVGGFRRRKPQGHDVDLLITIPGRPTDPELLHNVVDLLKKQGLLLYGDIRERTFVEGQLPNPAPDQLDGHQKCFAILKLYRPKVDNSAVGTSKKVDMAEVKDWKAVRVDLVVAPDEQFAYAKLGWTGSGMFRRDTRRYAEEEKNMLLDNHGLYDLKKGIFLSADSEEEIFGHLDLDYLEPWYRNA

SEQ ID NO: 6719 - DNA, 1182 bp, synthetic construct
  misc_feature 1..1182: note = Variant of terminal deoxynucleotidyl transferase
  source 1..1182: mol_type = other DNA
atgcaccatcatcaccatcacgggggctccggccatccggaaggtaataccccggagaaggaggtgccgagcgttatcgcccgtcatgttagtccgtacgcgtgccagcgcaagaccacgctgaataactacaacaaaaagatcaccgacgcgctggagatcatggccgagaactacaagtttaaagagaacctgcaggcgcgcctggaggcccgtcgcgccgcgagtgtcctgaaaagcctgccgttcgaggttaccagcatgaaagacatccaaggtctgccgtgcattaccgacgacgtacgtcctgtgatcgaagagatcatcgaagtaggcgagagcagccgtgttaaagaaatcctcaatgacgagcgctacaaggcgtttaagcagttcaccagcgtgttcggtgtgggcgtcaagaccgcggaaaagtggtaccgtatgggcctgcgtacgctgaaggaagtaaaggccagtaagttcctgaagctgaacaagatgcagaaggcgggcttcctgtactacgaggatctggcgagcggtgttacgaaagaagaaaaagatgccgttctggatatcgtgaaggaaacggtgtggactgttgatccggatgcgctggtgaccatcgtgggcggtttccgccgtcgcaaaccacagggccacgacgttgacctgctgatcacgattccgggccgtcctacggatccggagctgctccacaacgtggttgatctgctcaagaagcaaggtctgctgctgtacggggacatccgtgagcgtacgttcgtggaggggcaactgccaaatcctgcgccggaccagctggacggccatcagaagtgcttcgccattctcaagctgtaccgcccgaaggtggataacagtgcggttgggacgtcgaagaaagtcgacatggctgaggttaaggattggaaagcggttcgtgtggatctggtggtcgctccagatgagcagttcgcctatgcgaaactcggttggacgggcagcggcatgtttcgtcgcgatactcgtcgctacgcggaggaagagcgcgacatgctgctcgacaaccatggtctctacgacctgaaaaagggcatttttctgccggcggatagcgaagaagagattttcggtcatctggacctggattatctggagccgtggtatcgcaacgcg

SEQ ID NO: 6720 - protein, 394 aa, synthetic construct
  REGION 1..394: note = Variant of terminal deoxynucleotidyl transferase
MHHHHHHGGSGHPEGNTPEKEVPSVIARHVSPYACQRKTTLNNYNKKITDALEIMAENYKFKENLQARLEARRAASVLKSLPFEVTSMKDIQGLPCITDDVRPVIEEIIEVGESSRVKEILNDERYKAFKQFTSVFGVGVKTAEKWYRMGLRTLKEVKASKFLKLNKMQKAGFLYYEDLASGVTKEEKDAVLDIVKETVWTVDPDALVTIVGGFRRRKPQGHDVDLLITIPGRPTDPELLHNVVDLLKKQGLLLYGDIRERTFVEGQLPNPAPDQLDGHQKCFAILKLYRPKVDNSAVGTSKKVDMAEVKDWKAVRVDLVVAPDEQFAYAKLGWTGSGMFRRDTRRYAEEERDMLLDNHGLYDLKKGIFLPADSEEEIFGHLDLDYLEPWYRNA

SEQ ID NO: 6721 - DNA, 1182 bp, synthetic construct
  misc_feature 1..1182: note = Variant of terminal deoxynucleotidyl transferase
  source 1..1182: mol_type = other DNA
atgcaccatcatcaccatcacgggggctccggccatccggaaggtaataccccggagaaggaggtgccgagcgttatcgcccgtcatgttagtccgtacgcgtgccagcgcaagaccacgctgaataactacaacaaaaagatcaccgacgcgctggagatcatggccgagaactacaagtttaaagagaacatgcaggcgcgcctgcaggcccgtcgcgccgcgagtgtcctgaaaagcctgccgttcgaggttaccagcatgaaagacatccaaggtctgccgtgcattaccgacgacgtacgtcctgtgatcgaagagatcatcgaagtaggcgagagcagccgtgttaaagaaatcctcaatgacgagcgctacaaggcgtttaagcagttcaccagcgtgttcggtgtgggcgtcaagaccgcggaaaagtggtaccgtatgggcctccgtacgctggaagaagtaaaggccagtaagttcctgaagctgaacaagatgcagaaggcgggcttcctgtactacgaggatctggcgagcggtgttacgaaagaagaaaaagatgccgttctggatatcgtgaaggaaacggtgtggactgttgatccggatgcgctggtgaccatcgtgggcggtttccgccgtcgcaaaccacagggccacgacgttgacctgctgctgacgattccgggccgtcctacggatccggagctgctccacaacgtggttgatctgctcaagaagcaaggtctgctgctgtacggggacatccgtgagcgtacgttcgtggaggggcaactgccaaatcctgcgccggaccagctggacggccatcagaagtgcttcgccattctcaagctgtaccgcccgaaggtggataacagtgcggttgggacgtcgaagaaagtcgacatggctgaggttaaggattggaaagcggttcgtgtggatctggtggtcgctccagatgagcagttcgcctatgcgaaactcggttggacgggcagcggcatgtttcgtcgcgatactcgtcgctacgcggaggaagagcgcgacatgctgctcgacaaccatggtctctacgacctgaaaaagggcatttttctgagtgcgacgagcgaagaagagattttcggtcatctggacctggattatctggagccgtggtatcgcaacgcg

SEQ ID NO: 6722 - protein, 394 aa, synthetic construct
  REGION 1..394: note = Variant of terminal deoxynucleotidyl transferase
MHHHHHHGGSGHPEGNTPEKEVPSVIARHVSPYACQRKTTLNNYNKKITDALEIMAENYKFKENMQARLQARRAASVLKSLPFEVTSMKDIQGLPCITDDVRPVIEEIIEVGESSRVKEILNDERYKAFKQFTSVFGVGVKTAEKWYRMGLRTLEEVKASKFLKLNKMQKAGFLYYEDLASGVTKEEKDAVLDIVKETVWTVDPDALVTIVGGFRRRKPQGHDVDLLLTIPGRPTDPELLHNVVDLLKKQGLLLYGDIRERTFVEGQLPNPAPDQLDGHQKCFAILKLYRPKVDNSAVGTSKKVDMAEVKDWKAVRVDLVVAPDEQFAYAKLGWTGSGMFRRDTRRYAEEERDMLLDNHGLYDLKKGIFLSATSEEEIFGHLDLDYLEPWYRNA

SEQ ID NO: 6723 - DNA, 1182 bp, synthetic construct
  misc_feature 1..1182: note = Variant of terminal deoxynucleotidyl transferase
  source 1..1182: mol_type = other DNA
atgcaccatcatcaccatcacgggggctccggccatccggaaggtaataccccggagaaggaggtgccgagcgttatcgcccgtcatgttagtccgtacgcgtgccagcgcaagaccacgctgaataactacaacaaaaagatcaccgacgcgctggagatcatggccgagaactacaagtttaaagagaacctgcaggcgcgcctggaggcccgtcgcgccgcgagtgtcctgaaaagcctgccgttcgaggttaccagcatgaaagacatccaaggtctgccgtgcattaccgacgacgtacgtcctgtgatcgaagagatcatcgaagtaggcgagagcagccgtgttaaagaaatcctcaatgacgagcgctacaaggcgtttaagcagttcaccagcgtgttcggtgtgggcgtcaagaccgcggaaaagtggtaccgtatgggcaaacgtacgctggaggaagtaaaggccagtaagttcctgaagctgaacaagatgcagaaggcgggcttcctgtactacgaggatctggcgagcggtgttacgaaagaagaaaaagatgccgttctggatatcgtgaaggaaacggtgtggactgttgatccggatgcgctggtgaccatcgtgggcggtttccgccgtcgcaaaccacagggccacgacgttgacctgctgattacgattccgggccgtcctacggatccggagctgctccacaacgtggttgatctgctcaagaagcaaggtctgctgctgtacggggacatccgtgagcgtacgttcgtggaggggcaactgccaaatcctgcgccggaccagctggacggccatcagaagtgcttcgccattctcaagctgtaccgcccgaaggtggataacagtgcggttgggacgtcgaagaaagtcgacatggctgaggttaaggattggaaagcggttcgtgtggatctggtggtcgctccagatgagcagttcgcctatgcgaaactcggttggacgggcagcggcatgtttcgtcgcgatactcgtcgctacgcggaggaagagcgcgacatgctgctcgacaaccatggtctctacgacctgaaaaagggcatttttctgagtgcggatagcgaagaagagattttcggtcatctggacctggattatctggagccgtggtatcgcaacgcg

SEQ ID NO: 6724 - protein, 394 aa, synthetic construct
  REGION 1..394: note = Variant of terminal deoxynucleotidyl transferase
MHHHHHHGGSGHPEGNTPEKEVPSVIARHVSPYACQRKTTLNNYNKKITDALEIMAENYKFKENLQARLEARRAASVLKSLPFEVTSMKDIQGLPCITDDVRPVIEEIIEVGESSRVKEILNDERYKAFKQFTSVFGVGVKTAEKWYRMGKRTLEEVKASKFLKLNKMQKAGFLYYEDLASGVTKEEKDAVLDIVKETVWTVDPDALVTIVGGFRRRKPQGHDVDLLITIPGRPTDPELLHNVVDLLKKQGLLLYGDIRERTFVEGQLPNPAPDQLDGHQKCFAILKLYRPKVDNSAVGTSKKVDMAEVKDWKAVRVDLVVAPDEQFAYAKLGWTGSGMFRRDTRRYAEEERDMLLDNHGLYDLKKGIFLSADSEEEIFGHLDLDYLEPWYRNA

SEQ ID NO: 6725 - DNA, 1182 bp, synthetic construct
  misc_feature 1..1182: note = Variant of terminal deoxynucleotidyl transferase
  source 1..1182: mol_type = other DNA
atgcaccatcatcaccatcacgggggctccggccatccggaaggtaataccccggagaaggaggtgccgagcgttatcgcccgtcatgttagtccgtacgcgtgccagcgcaagaccacgctgaataactacaacaaaaagatcaccgacgcgctggagatcatggccgagaactacaagtttaaagagaacctgcaggcgcgcctggaggcccgtcgcgccgcgagtgtcctgaaaagcctgccgttcgaggttaccagcatgaaagacatccaaggtctgccgtgcattaccgacgacgtacgtcctgtgatcgaagagatcatcgaagtaggcgagagcagccgtgttaaagaaatcctcaatgacgagcgctacaagaaatttaagcagttcaccagcgtgttcggtgtgggcgtcaagaccgcggaaaagtggtaccgtatgggcctccgtacgctggaagaagtaaagcaaagtaagttcctgaagctgaacaagatgcagaaggcgggcttcctgtactacgaggatctggcgagcggtgttacgaaagaagaaaaagatgccgttctggatatcgtgaaggaaacggtgtggactgttgatccggatgcgctggtgaccatcgtgggcggtttccgccgtcgcaaaccgcagggccacgacgttgacctgctgatcacgattccgggccgtcctacggatccggagctgctccacaacgtggttgatctgctcaagaagcaaggtctgctgctgtacggggacatccgtgagcgtacgttcgtggaggggcaactgccaaatcctgcgccggaccagctggacggccatcagaagtgcttcgccattctcaagctgtaccgcccgaaggtggataacagtgcggttgggacgtcgaagaaagtcgacatggctgaggttaaggattggaaagcggttcgtgtggatctggtggtcgctccagatgagcagttcgcctatgcgaaactcggttggacgggcagcggcatgtttcgtcgcgatactcgtcgctacgcggaggaagagcgcgacatgctgctcgacaaccatggtctctacgacctgaaaaagggcatttttctgagtgcggacagcgaagaagagattttcggtcatctggacctggattatctggagccgtggtatcgcaacgcg

SEQ ID NO: 6726 - protein, 394 aa, synthetic construct
  REGION 1..394: note = Variant of terminal deoxynucleotidyl transferase
MHHHHHHGGSGHPEGNTPEKEVPSVIARHVSPYACQRKTTLNNYNKKITDALEIMAENYKFKENLQARLEARRAASVLKSLPFEVTSMKDIQGLPCITDDVRPVIEEIIEVGESSRVKEILNDERYKKFKQFTSVFGVGVKTAEKWYRMGLRTLEEVKQSKFLKLNKMQKAGFLYYEDLASGVTKEEKDAVLDIVKETVWTVDPDALVTIVGGFRRRKPQGHDVDLLITIPGRPTDPELLHNVVDLLKKQGLLLYGDIRERTFVEGQLPNPAPDQLDGHQKCFAILKLYRPKVDNSAVGTSKKVDMAEVKDWKAVRVDLVVAPDEQFAYAKLGWTGSGMFRRDTRRYAEEERDMLLDNHGLYDLKKGIFLSADSEEEIFGHLDLDYLEPWYRNA

SEQ ID NO: 6727 - DNA, 1182 bp, synthetic construct
  misc_feature 1..1182: note = Variant of terminal deoxynucleotidyl transferase
  source 1..1182: mol_type = other DNA
atgcaccatcatcaccatcacgggggctccggccatccggaaggtaataccccggagaaggaggtgccgagcgttatcgcccgtcatgttagtccgtacgcgtgccagcgcaagaccacgctgaataactacaacaaaaagatcaccgacgcgctggagatcatggccgagaactacaagtttaaagagaacctgcaggcgcgcctggaggcccgtcgcgccgcgagtgtcctgaaaagcctgccgttcgaggttaccagcatgaaagacatccaaggtctgccgtgcattaccgacgacgtacgtcctgtgatcgaagagatcatcgaagtaggcgagagcagccgtgttaaagaaatcctcaatgacgagcgctacaaggcgtttaagcagttcaccagcgtgttcggtgtgggcgtcaagaccgcggaaaagtggtaccgtatgggcaaacgtacgctgaaggaagtaaaggccagtaagttcctgaagctgaacaagatgcagaaggcgggcttcctgtactacgaggatctggcgagcggtgttacgaaagaagaaaaagatgccgttctggatatcgtgaaggaaacggtgtggactgttgatccggatgcgctggtggaaatcgtgggcggtttccgccgtcgcaaaacgcagggccacgacgttgacctgctgctgacgattccgggccgtcctacggatccggagctgctccacaacgtggttgatctgctcaagaagcaaggtctgctgctgtacggggacatccgtgagcgtacgttcgtggaggggcaactgccaaatcctgcgccggaccagctggacggccatcagaagtgcttcgccattctcaagctgtaccgcccgaaggtggataacagtgcggttgggacgtcgaagaaagtcgacatggctgaggttaaggattggaaagcggttcgtgtggatctggtggtcgctccagatgagcagttcgcctatgcgaaactcggttggacgggcagcggcatgtttcgtcgcgatactcgtcgctacgcggaggaagagcgcgatatgctgctcgacaaccatggtctctacgacctgaaaaagggcatttttctgccggcgacgagcgaagaagagattttcggtcatctggacctggattatctggagccgtggtatcgcaacgcg

SEQ ID NO: 6728 - protein, 394 aa, synthetic construct
  REGION 1..394: note = Variant of terminal deoxynucleotidyl transferase
MHHHHHHGGSGHPEGNTPEKEVPSVIARHVSPYACQRKTTLNNYNKKITDALEIMAENYKFKENLQARLEARRAASVLKSLPFEVTSMKDIQGLPCITDDVRPVIEEIIEVGESSRVKEILNDERYKAFKQFTSVFGVGVKTAEKWYRMGKRTLKEVKASKFLKLNKMQKAGFLYYEDLASGVTKEEKDAVLDIVKETVWTVDPDALVEIVGGFRRRKTQGHDVDLLLTIPGRPTDPELLHNVVDLLKKQGLLLYGDIRERTFVEGQLPNPAPDQLDGHQKCFAILKLYRPKVDNSAVGTSKKVDMAEVKDWKAVRVDLVVAPDEQFAYAKLGWTGSGMFRRDTRRYAEEERDMLLDNHGLYDLKKGIFLPATSEEEIFGHLDLDYLEPWYRNA

SEQ ID NO: 6729 - DNA, 1182 bp, synthetic construct
  misc_feature 1..1182: note = Variant of terminal deoxynucleotidyl transferase
  source 1..1182: mol_type = other DNA
atgcaccatcatcaccatcacgggggctccggccatccggaaggtaataccccggagaaggaggtgccgagcgttatcgcccgtcatgttagtccgtacgcgtgccagcgcaagaccacgctgaataactacaacaaaaagatcaccgacgcgctggagatcatggccgagaactacaagtttaaagagaacctgcaggcgcgcctgcaggcccgtcgcgccgcgagtgtcctgaaaagcctgccgttcgaggttaccagcatgaaagacatccaaggtctgccgtgcattaccgacgacgtacgtcctgtgatcgaagagatcatcgaagtaggcgagagcagccgtgttaaagaaatcctcaatgacgagcgctacaaggcgtttaagcagttcaccagcgtgttcggtgtgggcgtcaagaccgcggaaaagtggtaccgtatgggcctgcgtacgctgaaggaagtaaaggccagtaagttcctgaagctgaacaagatgcagaaggcgggcttcctgtactacgaggatctggcgagcggtgttacgaaagaagaaaaagatgccgttctggatatcgtgaaggaaacggtgtggactgttgatccggatgcgctggtgaccatcgtgggcggtttccgccgtcgcaaaccgcagggccacgacgttgacctgctgatcacgattccgggccgtcctacggatccggagctgctccacaacgtggttgatctgctcaagaagcaaggtctgctgctgtacggggacatccgtgagcgtacgttcgtggaggggcaactgccaaatcctgcgccggaccagctggacggccatcagaagtgcttcgccattctcaagctgtaccgcccgaaggtggataacagtgcggttgggacgtcgaagaaagtcgacatggctgaggttaaggattggaaagcggttcgtgtggatctggtggtcgctccagatgagcagttcgcctatgcgaaactcggttggacgggcagcggcatgtttcgtcgcgatactcgtcgctacgcggaggaagagaaaaatatgctgctcgacaaccatggtctctacgacctgaaaaagggcatttttctgagtgcggatagcgaagaagagattttcggtcatctggacctggattatctggagccgtggtatcgcaacgcg

SEQ ID NO: 6730 - protein, 394 aa, synthetic construct
  REGION 1..394: note = Variant of terminal deoxynucleotidyl transferase
MHHHHHHGGSGHPEGNTPEKEVPSVIARHVSPYACQRKTTLNNYNKKITDALEIMAENYKFKENLQARLQARRAASVLKSLPFEVTSMKDIQGLPCITDDVRPVIEEIIEVGESSRVKEILNDERYKAFKQFTSVFGVGVKTAEKWYRMGLRTLKEVKASKFLKLNKMQKAGFLYYEDLASGVTKEEKDAVLDIVKETVWTVDPDALVTIVGGFRRRKPQGHDVDLLITIPGRPTDPELLHNVVDLLKKQGLLLYGDIRERTFVEGQLPNPAPDQLDGHQKCFAILKLYRPKVDNSAVGTSKKVDMAEVKDWKAVRVDLVVAPDEQFAYAKLGWTGSGMFRRDTRRYAEEEKNMLLDNHGLYDLKKGIFLSADSEEEIFGHLDLDYLEPWYRNA

SEQ ID NO: 6731 - DNA, 1182 bp, synthetic construct
  misc_feature 1..1182: note = Variant of terminal deoxynucleotidyl transferase
  source 1..1182: mol_type = other DNA
atgcaccatcatcaccatcacgggggctccggccatccggaaggtaataccccggagaaggaggtgccgagcgttatcgcccgtcatgttagtccgtacgcgtgccagcgcaagaccacgctgaataactacaacaaaaagatcaccgacgcgctggagatcatggccgagaactacaagtttaaagagaacatgcaggcgcgcctggaggcccgtcgcgccgcgagtgtcctgaaaagcctgccgttcgaggttaccagcatgaaagacatccaaggtctgccgtgcattaccgacgacgtacgtcctgtgatcgaagagatcatcgaagtaggcgagagcagccgtgttaaagaaatcctcaatgacgagcgctacaaggcgtttaagcagttcaccagcgtgttcggtgtgggcgtcaagaccgcggaaaagtggtaccgtatgggcctgcgtacgctggaggaagtaaaggccagtaagttcctgaagctgaacaagatgcagaaggcgggcttcctgtactacgaggatctggcgagcggtgttacgaaagaagaaaaagatgccgttctggatatcgtgaaggaaacggtgtggactgttgatccggatgcgctggtgaccatcgtgggcggtttccgccgtcgcaaaccacagggccacgacgttgacctgctgctgacgattccgggccgtcctacggatccggagctgctccacaacgtggttgatctgctcaagaagcaaggtctgctgctgtacggggacatccgtgagcgtacgttcgtggaggggcaactgccaaatcctgcgccggaccagctggacggccatcagaagtgcttcgccattctcaagctgtaccgcccgaaggtggataacagtgcggttgggacgtcgaagaaagtcgacatggctgaggttaaggattggaaagcggttcgtgtggatctggtggtcgctccagatgagcagttcgcctatgcgaaactcggttggacgggcagcggcatgtttcgtcgcgatactcgtcgctacgcggaggaagagcgcgacatgctgctcgacaaccatggtctctacgacctgaaaaagggcatttttctgccggcggatagcgaagaagagattttcggtcatctggacctggattatctggagccgtggtatcgcaacgcg

SEQ ID NO: 6732 - protein, 394 aa, synthetic construct
  REGION 1..394: note = Variant of terminal deoxynucleotidyl transferase
MHHHHHHGGSGHPEGNTPEKEVPSVIARHVSPYACQRKTTLNNYNKKITDALEIMAENYKFKENMQARLEARRAASVLKSLPFEVTSMKDIQGLPCITDDVRPVIEEIIEVGESSRVKEILNDERYKAFKQFTSVFGVGVKTAEKWYRMGLRTLEEVKASKFLKLNKMQKAGFLYYEDLASGVTKEEKDAVLDIVKETVWTVDPDALVTIVGGFRRRKPQGHDVDLLLTIPGRPTDPELLHNVVDLLKKQGLLLYGDIRERTFVEGQLPNPAPDQLDGHQKCFAILKLYRPKVDNSAVGTSKKVDMAEVKDWKAVRVDLVVAPDEQFAYAKLGWTGSGMFRRDTRRYAEEERDMLLDNHGLYDLKKGIFLPADSEEEIFGHLDLDYLEPWYRNA

SEQ ID NO: 6733 - DNA, 1182 bp, synthetic construct
  misc_feature 1..1182: note = Variant of terminal deoxynucleotidyl transferase
  source 1..1182: mol_type = other DNA
atgcaccatcatcaccatcacgggggctccggccatccggaaggtaataccccggagaaggaggtgccgagcgttatcgcccgtcatgttagtccgtacgcgtgccagcgcaagaccacgctgaataactacaacaaaaagatcaccgacgcgctggagatcatggccgagaactacaagtttaaagagaacctgcaggcgcgcctggaggcccgtcgcgccgcgagtgtcctgaaaagcctgccgttcgaggttaccagcatgaaagacatccaaggtctgccgtgcattaccgacgacgtacgtcctgtgatcgaagagatcatcgaagtaggcgagagcagccgtgttaaagaaatcctcaatgacgagcgctacaaggcgtttaagcagttcaccagcgtgttcggtgtgggcgtcaagaccgcggaaaagtggtaccgtatgggcaaacgtacgctggaggaagtaaaggccagtaagttcctgaagctgaacaagatgcagaaggcgggcttcctgtactacgaggatctggcgagcggtgttacgaaagaagaaaaagatgccgttctggatatcgtgaaggaaacggtgtggactgttgatccggatgcgctggtgaccatcgtgggcggtttccgccgtcgcaaaccacagggccacgacgttgacctgctgatcacgattccgggccgtcctacggatccggagctgctccacaacgtggttgatctgctcaagaagcaaggtctgctgctgtacggggacatccgtgagcgtacgttcgtggaggggcaactgccaaatcctgcgccggaccagctggacggccatcagaagtgcttcgccattctcaagctgtaccgcccgaaggtggataacagtgcggttgggacgtcgaagaaagtcgacatggctgaggttaaggattggaaagcggttcgtgtggatctggtggtcgctccagatgagcagttcgcctatgcgaaactcggttggacgggcagcggcatgtttcgtcgcgatactcgtcgctacgcggaggaagagcgcgacatgctgctcgacaaccatggtctctacgacctgaaaaagggcatttttctgagtgcgacgagcgaagaagagattttcggtcatctggacctggattatctggagccgtggtatcgcaacgcg

SEQ ID NO: 6734 - protein, 394 aa, synthetic construct
  REGION 1..394: note = Variant of terminal deoxynucleotidyl transferase
MHHHHHHGGSGHPEGNTPEKEVPSVIARHVSPYACQRKTTLNNYNKKITDALEIMAENYKFKENLQARLEARRAASVLKSLPFEVTSMKDIQGLPCITDDVRPVIEEIIEVGESSRVKEILNDERYKAFKQFTSVFGVGVKTAEKWYRMGKRTLEEVKASKFLKLNKMQKAGFLYYEDLASGVTKEEKDAVLDIVKETVWTVDPDALVTIVGGFRRRKPQGHDVDLLITIPGRPTDPELLHNVVDLLKKQGLLLYGDIRERTFVEGQLPNPAPDQLDGHQKCFAILKLYRPKVDNSAVGTSKKVDMAEVKDWKAVRVDLVVAPDEQFAYAKLGWTGSGMFRRDTRRYAEEERDMLLDNHGLYDLKKGIFLSATSEEEIFGHLDLDYLEPWYRNA

SEQ ID NO: 6735 - DNA, 1182 bp, synthetic construct
  misc_feature 1..1182: note = Variant of terminal deoxynucleotidyl transferase
  source 1..1182: mol_type = other DNA
atgcaccatcatcaccatcacgggggctccggccatccggaaggtaataccccggagaaggaggtgccgagcgttatcgcccgtcatgttagtccgtacgcgtgccagcgcaagaccacgctgaataactacaacaaaaagatcaccgacgcgctggagatcacggccgagaactacaagtttaaagagaacatgcaggcgcgcctggaggcccgtcgcgccgcgagtgtcctgaaaagcctgccgttcgaggttaccagcatgaaagacatccaaggtctgccgtgcattaccgacgacgtacgtcctgtgatcgaagagatcatcgaagtaggcgagagcagccgtgttaaagaaatcctcaatgacgagcgctacaaggcgtttaagcagttcaccagcgtgttcggtgtgggcgtcaagaccgcggaaaagtggtaccgtatgggcaaacgtacgctggaggaagtaaaggccagtaagttcctgaagctgaacaagatgcagaaggcgggcttcctgtactacgaggatctggcgagcggtgttacgaaagaagaaaaagatgccgttctggatatcgtgaaggaaacggtgtggactgttgatccggatgcgctggtgaccatcgtgggcggtttccgccgtcgcaaaccacagggccacgacgttgacctgctgatcacgattccgggccgtcctacggatccggagctgctccacaacgtggttgatctgctcaagaagcaaggtctgctgctgtacggggacatccgtgagcgtacgttcgtggaggggcaactgccaaatcctgcgccggaccagctggacggccatcagaagtgcttcgccattctcaagctgtaccgcccgaaggtggataacagtgcggttgggacgtcgaagaaagtcgacatggctgaggttaaggattggaaagcggttcgtgtggatctggtggtcgctccagatgagcagttcgcctatgcgaaactcggttggacgggcagcggcatgtttcgtcgcgatactcgtcgctacgcggaggaagagcgcgacatgctgctcgacaaccatggtctctacgacctgaaaaagggcatttttctgagtgcggatagcgaagaagagattttcggtcatctggacctggattatctggagccgtggtatcgcaacgcg

SEQ ID NO: 6736 - protein, 394 aa, synthetic construct
  REGION 1..394: note = Variant of terminal deoxynucleotidyl transferase
MHHHHHHGGSGHPEGNTPEKEVPSVIARHVSPYACQRKTTLNNYNKKITDALEITAENYKFKENMQARLEARRAASVLKSLPFEVTSMKDIQGLPCITDDVRPVIEEIIEVGESSRVKEILNDERYKAFKQFTSVFGVGVKTAEKWYRMGKRTLEEVKASKFLKLNKMQKAGFLYYEDLASGVTKEEKDAVLDIVKETVWTVDPDALVTIVGGFRRRKPQGHDVDLLITIPGRPTDPELLHNVVDLLKKQGLLLYGDIRERTFVEGQLPNPAPDQLDGHQKCFAILKLYRPKVDNSAVGTSKKVDMAEVKDWKAVRVDLVVAPDEQFAYAKLGWTGSGMFRRDTRRYAEEERDMLLDNHGLYDLKKGIFLSADSEEEIFGHLDLDYLEPWYRNA

SEQ ID NO: 6737 - DNA, 1182 bp, synthetic construct
  misc_feature 1..1182: note = Variant of terminal deoxynucleotidyl transferase
  source 1..1182: mol_type = other DNA
atgcaccatcatcaccatcacgggggctccggccatccggaaggtaataccccggagaaggaggtgccgagcgttatcgcccgtcatgttagtccgtacgcgtgccagcgcaagaccacgctgaataactacaacaaaaagatcaccgacgcgctggagatcatggccgagaactacaagtttaaagagaacctgcaggcgcgcctggaggcccgtcgcgccgcgagtgtcctgaaaagcctgccgttcgaggttaccagcatgaaagacatccaaggtctgccgtgcattaccgacgacgtacgtcctgtgatcgaagagatcatcgaagtaggcgagagcagccgtgttaaagaaatcctcaatgacgagcgctacaaggcgtttaagcagttcaccagcgtgttcggtgtgggcgtcaagaccgcggaaaagtggtaccgtatgggcctgcgtacgctgaaggaagtaaaggccagtaagttcctgaagctgaacaagatgcagaaggcgggcttcctgtactacgaggatctggcgagcggtgttacgaaagaagaaaaagatgccgttctggatatcgtgaaggaaacggtgtggactgttgatccggatgcgctggtgaccatcgtgggcggtttccgccgtcgcaaaccacagggccacgacgttgacctgctgctgacgattccgggccgtcctacggatccggagctgctccacaacgtggttgatctgctcaagaagcaaggtctgctgctgtacggggacatccgtgagcgtacgttcgtggaggggcaactgccaaatcctgcgccggaccagctggacggccatcagaagtgcttcgccattctcaagctgtaccgcccgaaggtggataacagtgcggttgggacgtcgaagaaagtcgacatggctgaggttaaggattggaaagcggttcgtgtggatctggtggtcgctccagatgagcagttcgcctatgcgaaactcggttggacgggcagcggcatgtttcgtcgcgatactcgtcgctacgcggaggaagagcgcgatatgctgctcgacaaccatggtctctacgacctgaaaaagggcatttttctgccggcggatagcgaagaagagattttcggtcatctggacctggattatctggagccgtggtatcgcaacgcg

SEQ ID NO: 6738 - protein, 394 aa, synthetic construct
  REGION 1..394: note = Variant of terminal deoxynucleotidyl transferase
MHHHHHHGGSGHPEGNTPEKEVPSVIARHVSPYACQRKTTLNNYNKKITDALEIMAENYKFKENLQARLEARRAASVLKSLPFEVTSMKDIQGLPCITDDVRPVIEEIIEVGESSRVKEILNDERYKAFKQFTSVFGVGVKTAEKWYRMGLRTLKEVKASKFLKLNKMQKAGFLYYEDLASGVTKEEKDAVLDIVKETVWTVDPDALVTIVGGFRRRKPQGHDVDLLLTIPGRPTDPELLHNVVDLLKKQGLLLYGDIRERTFVEGQLPNPAPDQLDGHQKCFAILKLYRPKVDNSAVGTSKKVDMAEVKDWKAVRVDLVVAPDEQFAYAKLGWTGSGMFRRDTRRYAEEERDMLLDNHGLYDLKKGIFLPADSEEEIFGHLDLDYLEPWYRNA

SEQ ID NO: 6739 - DNA, 1182 bp, synthetic construct
  misc_feature 1..1182: note = Variant of terminal deoxynucleotidyl transferase
  source 1..1182: mol_type = other DNA
atgcaccatcatcaccatcacgggggctccggccatccggaaggtaataccccggagaaggaggtgccgagcgttatcgcccgtcatgttagtccgtacgcgtgccagcgcaagaccacgctgaataactacaacaaaaagatcaccgacgcgctggagatcatggccgagaactacaagtttaaagagaacctgcaggcgcgcctggaggcccgtcgcgccgcgagtgtcctgaaaagcctgccgttcgaggttaccagcatgaaagacatccaaggtctgccgtgcattaccgacgacgtacgtcctgtgatcgaagagatcatcgaagtaggcgagagcagccgtgttaaagaaatcctcaatgacgagcgctacaaggcgtttaagcagttcaccagcgtgttcggtgtgggcgtcaagaccgcggaaaagtggtaccgtatgggcaaacgtacgctgaaggaagtaaaggccagtaagttcctgaagctgaacaagatgcagaaggcgggcttcctgtactacgaggatctggcgagcggtgttacgaaagaagaaaaagatgccgttctggatatcgtgaaggaaacggtgtggactgttgatccggatgcgctggtggaaatcgtgggcggtttccgccgtcgcaaaccacagggccacgacgttgacctgctgattacgattccgggccgtcctacggatccggagctgctccacaacgtggttgatctgctcaagaagcaaggtctgctgctgtacggggacatccgtgagcgtacgttcgtggaggggcaactgccaaatcctgcgccggaccagctggacggccatcagaagtgcttcgccattctcaagctgtaccgcccgaaggtggataacagtgcggttgggacgtcgaagaaagtcgacatggctgaggttaaggattggaaagcggttcgtgtggatctggtggtcgctccagatgagcagttcgcctatgcgaaactcggttggacgggcagcggcatgtttcgtcgcgatactcgtcgctacgcggaggaagagcgcgatatgctgctcgacaaccatggtctctacgacctgaaaaagggcatttttctgagtgcggacagcgaagaagagattttcggtcatctggacctggattatctggagccgtggtatcgcaacgcg

SEQ ID NO: 6740 - protein, 394 aa, synthetic construct
  REGION 1..394: note = Variant of terminal deoxynucleotidyl transferase
MHHHHHHGGSGHPEGNTPEKEVPSVIARHVSPYACQRKTTLNNYNKKITDALEIMAENYKFKENLQARLEARRAASVLKSLPFEVTSMKDIQGLPCITDDVRPVIEEIIEVGESSRVKEILNDERYKAFKQFTSVFGVGVKTAEKWYRMGKRTLKEVKASKFLKLNKMQKAGFLYYEDLASGVTKEEKDAVLDIVKETVWTVDPDALVEIVGGFRRRKPQGHDVDLLITIPGRPTDPELLHNVVDLLKKQGLLLYGDIRERTFVEGQLPNPAPDQLDGHQKCFAILKLYRPKVDNSAVGTSKKVDMAEVKDWKAVRVDLVVAPDEQFAYAKLGWTGSGMFRRDTRRYAEEERDMLLDNHGLYDLKKGIFLSADSEEEIFGHLDLDYLEPWYRNA

SEQ ID NO: 6741 - DNA, 1182 bp, synthetic construct
  misc_feature 1..1182: note = Variant of terminal deoxynucleotidyl transferase
  source 1..1182: mol_type = other DNA
atgcaccatcatcaccatcacgggggctccggccatccggaaggtaataccccggagaaggaggtgccgagcgttatcgcccgtcatgttagtccgtacgcgtgccagcgcaagaccacgctgaataactacaacaaaaagatcaccgacgcgctggagatcatggccgagaactacaagtttaaagagaacctgcaggcgcgcctggaggcccgtcgcgccgcgagtgtcctgaaaagcctgccgttcgaggttaccagcatgaaagacatccaaggtctgccgtgcattaccgacgacgtacgtcctgtgatcgaagagatcatcgaagtaggcgagagcagccgtgttaaagaaatcctcaatgacgagcgctacaagaaatttaagcagttcaccagcgtgttcggtgtgggcgtcaagaccgcggaaaagtggtaccgtatgggcctccgtacgctggaagaagtaaagcgtagtaagttcctgaagctgaacaagatgcagaaggcgggcttcctgtactacgaggatctggcgagcggtgttacgaaagaagaaaaagatgccgttctggatatcgtgaaggaaacggtgtggactgttgatccggatgcgctggtgaccatcgtgggcggtttccgccgtcgcaaaccgcagggccacgacgttgacctgctgatcacgattccgggccgtcctacggatccggagctgctccacaacgtggttgatctgctcaagaagcaaggtctgctgctgtacggggacatccgtgagcgtacgttcgtggaggggcaactgccaaatcctgcgccggaccagctggacggccatcagaagtgcttcgccattctcaagctgtaccgcccgaaggtggataacagtgcggttgggacgtcgaagaaagtcgacatggctgaggttaaggattggaaagcggttcgtgtggatctggtggtcgctccagatgagcagttcgcctatgcgaaactcggttggacgggcagcggcatgtttcgtcgcgatactcgtcgctacgcggaggaagagcgcgatatgctgctcgacaaccatggtctctacgacctgaaaaagggcatttttctgagtgcggatagcgaagaagagattttcggtcatctggacctggattatctggagccgtggtatcgcaacgcg

SEQ ID NO: 6742 - protein, 394 aa, synthetic construct
  REGION 1..394: note = Variant of terminal deoxynucleotidyl transferase
MHHHHHHGGSGHPEGNTPEKEVPSVIARHVSPYACQRKTTLNNYNKKITDALEIMAENYKFKENLQARLEARRAASVLKSLPFEVTSMKDIQGLPCITDDVRPVIEEIIEVGESSRVKEILNDERYKKFKQFTSVFGVGVKTAEKWYRMGLRTLEEVKRSKFLKLNKMQKAGFLYYEDLASGVTKEEKDAVLDIVKETVWTVDPDALVTIVGGFRRRKPQGHDVDLLITIPGRPTDPELLHNVVDLLKKQGLLLYGDIRERTFVEGQLPNPAPDQLDGHQKCFAILKLYRPKVDNSAVGTSKKVDMAEVKDWKAVRVDLVVAPDEQFAYAKLGWTGSGMFRRDTRRYAEEERDMLLDNHGLYDLKKGIFLSADSEEEIFGHLDLDYLEPWYRNA

SEQ ID NO: 6743 - DNA, 1182 bp, synthetic construct
  misc_feature 1..1182: note = Variant of terminal deoxynucleotidyl transferase
  source 1..1182: mol_type = other DNA
atgcaccatcatcaccatcacgggggctccggccatccggaaggtaataccccggagaaggaggtgccgagcgttatcgcccgtcatgttagtccgtacgcgtgccagcgcaagaccacgctgaataactacaacaaaaagatcaccgacgcgctggagatcatggccgagaactacaagtttaaagagaacctgcaggcgcgcctggaggcccgtcgcgccgcgagtgtcctgaaaagcctgccgttcgaggttaccagcatgaaagacatccaaggtctgccgtgcattaccgacgacgtacgtcctgtgatcgaagagatcatcgaagtaggcgagagcagccgtgttaaagaaatcctcaatgacgagcgctacaagaaatttaagcagttcaccagcgtgttcggtgtgggcgtcaagaccgcggaaaagtggtaccgtatgggcctgcgtacgctgaaggaagtaaaggccagtaagttcctgaagctgaacaagatgcagaaggcgggcttcctgtactacgaggatctggcgagcggtgttacgaaagaagaaaaagatgccgttctggatatcgtgaaggaaacggtgtggactgttgatccggatgcgctggtggaaatcgtgggcggtttccgccgtcgcaaaccacagggccacgacgttgacctgctgattacgattccgggccgtcctacggatccggagctgctccacaacgtggttgatctgctcaagaagcaaggtctgctgctgtacggggacatccgtgagcgtacgttcgtggaggggcaactgccaaatcctgcgccggaccagctggacggccatcagaagtgcttcgccattctcaagctgtaccgcccgaaggtggataacagtgcggttgggacgtcgaagaaagtcgacatggctgaggttaaggattggaaagcggttcgtgtggatctggtggtcgctccagatgagcagttcgcctatgcgaaactcggttggacgggcagcggcatgtttcgtcgcgatactcgtcgctacgcggaggaagagcgcgatatgctgctcgacaaccatggtctctacgacctgaaaaagggcatttttctgagtgcggacagcgaagaagagattttcggtcatctggacctggattatctggagccgtggtatcgcaacgcg

SEQ ID NO: 6744 - protein, 394 aa, synthetic construct
  REGION 1..394: note = Variant of terminal deoxynucleotidyl transferase
MHHHHHHGGSGHPEGNTPEKEVPSVIARHVSPYACQRKTTLNNYNKKITDALEIMAENYKFKENLQARLEARRAASVLKSLPFEVTSMKDIQGLPCITDDVRPVIEEIIEVGESSRVKEILNDERYKKFKQFTSVFGVGVKTAEKWYRMGLRTLKEVKASKFLKLNKMQKAGFLYYEDLASGVTKEEKDAVLDIVKETVWTVDPDALVEIVGGFRRRKPQGHDVDLLITIPGRPTDPELLHNVVDLLKKQGLLLYGDIRERTFVEGQLPNPAPDQLDGHQKCFAILKLYRPKVDNSAVGTSKKVDMAEVKDWKAVRVDLVVAPDEQFAYAKLGWTGSGMFRRDTRRYAEEERDMLLDNHGLYDLKKGIFLSADSEEEIFGHLDLDYLEPWYRNA

SEQ ID NO: 6745 - DNA, 1182 bp, synthetic construct
  misc_feature 1..1182: note = Variant of terminal deoxynucleotidyl transferase
  source 1..1182: mol_type = other DNA
atgcaccatcatcaccatcacgggggctccggccatccggaaggtaataccccggagaaggaggtgccgagcgttatcgcccgtcatgttagtccgtacgcgtgccagcgcaagaccacgctgaataactacaacaaaaagatcaccgacgcgctggagatcatggccgagaactacaagtttaaagagaacctgcaggcgcgcctggaggcccgtcgcgccgcgagtgtcctgaaaagcctgccgttcgaggttaccagcatgaaagacatccaaggtctgccgtgcattaccgacgacgtacgtcctgtgatcgaagagatcatcgaagtaggcgagagcagccgtgttaaagaaatcctcaatgacgagcgctacaaggcgtttaagcagttcaccagcgtgttcggtgtgggcgtcaagaccgcggaaaagtggtaccgtatgggcaaacgtacgctggaggaagtaaaggccagtaagttcctgaagctgaacaagatgcagaaggcgggcttcctgtactacgaggatctggcgagcggtgttacgaaagaagaaaaagatgccgttctggatatcgtgaaggaaacggtgtggactgttgatccggatgcgctggtggaaatcgtgggcggtttccgccgtcgcaaaccacagggccacgacgttgacctgctgatcacgattccgggccgtcctacggatccggagctgctccacaacgtggttgatctgctcaagaagcaaggtctgctgctgtacggggacatccgtgagcgtacgttcgtggaggggcaactgccaaatcctgcgccggaccagctggacggccatcagaagtgcttcgccattctcaagctgtaccgcccgaaggtggataacagtgcggttgggacgtcgaagaaagtcgacatggctgaggttaaggattggaaagcggttcgtgtggatctggtggtcgctccagatgagcagttcgcctatgcgaaactcggttggacgggcagcggcatgtttcgtcgcgatactcgtcgctacgcggaggaagagcgcgacatgctgctcgacaaccatggtctctacgacctgaaaaagggcatttttctgccggcgacgagcgaagaagagattttcggtcatctggacctggattatctggagccgtggtatcgcaacgcg

SEQ ID NO: 6746 - protein, 394 aa, synthetic construct
  REGION 1..394: note = Variant of terminal deoxynucleotidyl transferase
MHHHHHHGGSGHPEGNTPEKEVPSVIARHVSPYACQRKTTLNNYNKKITDALEIMAENYKFKENLQARLEARRAASVLKSLPFEVTSMKDIQGLPCITDDVRPVIEEIIEVGESSRVKEILNDERYKAFKQFTSVFGVGVKTAEKWYRMGKRTLEEVKASKFLKLNKMQKAGFLYYEDLASGVTKEEKDAVLDIVKETVWTVDPDALVEIVGGFRRRKPQGHDVDLLITIPGRPTDPELLHNVVDLLKKQGLLLYGDIRERTFVEGQLPNPAPDQLDGHQKCFAILKLYRPKVDNSAVGTSKKVDMAEVKDWKAVRVDLVVAPDEQFAYAKLGWTGSGMFRRDTRRYAEEERDMLLDNHGLYDLKKGIFLPATSEEEIFGHLDLDYLEPWYRNA

SEQ ID NO: 6747 - DNA, 1182 bp, synthetic construct
  misc_feature 1..1182: note = Variant of terminal deoxynucleotidyl transferase
  source 1..1182: mol_type = other DNA
atgcaccatcatcaccatcacgggggctccggccatccggaaggtaataccccggagaaggaggtgccgagcgttatcgcccgtcatgttagtccgtacgcgtgccagcgcaagaccacgctgaataactacaacaaaaagatcaccgacgcgctggagatcatggccgagaactacaagtttaaagagaacctgcaggcgcgcctggaggcccgtcgcgccgcgagtgtcctgaaaagcctgccgttcgaggttaccagcatgaaagacatccaaggtctgccgtgcattaccgacgacgtacgtcctgtgatcgaagagatcatcgaagtaggcgagagcagccgtgttaaagaaatcctcaatgacgagcgctacaaggcgtttaagcagttcaccagcgtgttcggtgtgggcgtcaagaccgcggaaaagtggtaccgtatgggcctgcgtacgctgaaggaagtaaaggccagtaagttcctgaagctgaacaagatgcagaaggcgggcttcctgtactacgaggatctggcgagcggtgttacgaaagaagaaaaagatgccgttctggatatcgtgaaggaaacggtgtggactgttgatccggatgcgctggtgaccatcgtgggcggtttccgccgtcgcaaaccgcagggccacgacgttgacctgctgctgacgattccgggccgtcctacggatccggagctgctccacaacgtggttgatctgctcaagaagcaaggtctgctgctgtacggggacatccgtgagcgtacgttcgtggaggggcaactgccaaatcctgcgccggaccagctggacggccatcagaagtgcttcgccattctcaagctgtaccgcccgaaggtggataacagtgcggttgggacgtcgaagaaagtcgacatggctgaggttaaggattggaaagcggttcgtgtggatctggtggtcgctccagatgagcagttcgcctatgcgaaactcggttggacgggcagcggcatgtttcgtcgcgatactcgtcgctacgcggaggaagagcgcgacatgctgctcgacaaccatggtctctacgacctgaaaaagggcatttttctgccggcgacgagcgaagaagagattttcggtcatctggacctggattatctggagccgtggtatcgcaacgcg

SEQ ID NO: 6748 - protein, 394 aa, synthetic construct
  REGION 1..394: note = Variant of terminal deoxynucleotidyl transferase
MHHHHHHGGSGHPEGNTPEKEVPSVIARHVSPYACQRKTTLNNYNKKITDALEIMAENYKFKENLQARLEARRAASVLKSLPFEVTSMKDIQGLPCITDDVRPVIEEIIEVGESSRVKEILNDERYKAFKQFTSVFGVGVKTAEKWYRMGLRTLKEVKASKFLKLNKMQKAGFLYYEDLASGVTKEEKDAVLDIVKETVWTVDPDALVTIVGGFRRRKPQGHDVDLLLTIPGRPTDPELLHNVVDLLKKQGLLLYGDIRERTFVEGQLPNPAPDQLDGHQKCFAILKLYRPKVDNSAVGTSKKVDMAEVKDWKAVRVDLVVAPDEQFAYAKLGWTGSGMFRRDTRRYAEEERDMLLDNHGLYDLKKGIFLPATSEEEIFGHLDLDYLEPWYRNA

SEQ ID NO: 6749 - DNA, 1182 bp, synthetic construct
  misc_feature 1..1182: note = Variant of terminal deoxynucleotidyl transferase
  source 1..1182: mol_type = other DNA
atgcaccatcatcaccatcacgggggctccggccatccggaaggtaataccccggagaaggaggtgccgagcgttatcgcccgtcatgttagtccgtacgcgtgccagcgcaagaccacgctgaataactacaacaaaaagatcaccgacgcgctggagatcatggccgagaactacaagtttaaagagaacctgcaggcgcgcctggaggcccgtcgcgccgcgagtgtcctgaaaagcctgccgttcgaggttaccagcatgaaagacatccaaggtctgccgtgcattaccgacgacgtacgtcctgtgatcgaagagatcatcgaagtaggcgagagcagccgtgttaaagaaatcctcaatgacgagcgctacaaggcgtttaagcagttcaccagcgtgttcggtgtgggcgtcaagaccgcggaaaagtggtaccgtatgggcaaacgtacgctggaggaagtaaaggccagtaagttcctgaagctgaacaagatgcagaaggcgggcttcctgtactacgaggatctggcgagcggtgttacgaaagaagaaaaagatgccgttctggatatcgtgaaggaaacggtgtggactgttgatccggatgcgctggtgaccatcgtgggcggtttccgccgtcgcaaaacgcagggccacgacgttgacctgctgatcacgattccgggccgtcctacggatccggagctgctccacaacgtggttgatctgctcaagaagcaaggtctgctgctgtacggggacatccgtgagcgtacgttcgtggaggggcaactgccaaatcctgcgccggaccagctggacggccatcagaagtgcttcgccattctcaagctgtaccgcccgaaggtggataacagtgcggttgggacgtcgaagaaagtcgacatggctgaggttaaggattggaaagcggttcgtgtggatctggtggtcgctccagatgagcagttcgcctatgcgaaactcggttggacgggcagcggcatgtttcgtcgcgatactcgtcgctacgcggaggaagagcgcgacatgctgctcgacaaccatggtctctacgacctgaaaaagggcatttttctgccggcggatagcgaagaagagattttcggtcatctggacctggattatctggagccgtggtatcgcaacgcg

SEQ ID NO: 6750 - protein, 394 aa, synthetic construct
  REGION 1..394: note = Variant of terminal deoxynucleotidyl transferase
MHHHHHHGGSGHPEGNTPEKEVPSVIARHVSPYACQRKTTLNNYNKKITDALEIMAENYKFKENLQARLEARRAASVLKSLPFEVTSMKDIQGLPCITDDVRPVIEEIIEVGESSRVKEILNDERYKAFKQFTSVFGVGVKTAEKWYRMGKRTLEEVKASKFLKLNKMQKAGFLYYEDLASGVTKEEKDAVLDIVKETVWTVDPDALVTIVGGFRRRKTQGHDVDLLITIPGRPTDPELLHNVVDLLKKQGLLLYGDIRERTFVEGQLPNPAPDQLDGHQKCFAILKLYRPKVDNSAVGTSKKVDMAEVKDWKAVRVDLVVAPDEQFAYAKLGWTGSGMFRRDTRRYAEEERDMLLDNHGLYDLKKGIFLPADSEEEIFGHLDLDYLEPWYRNA

SEQ ID NO: 6751 - DNA, 1182 bp, synthetic construct
  misc_feature 1..1182: note = Variant of terminal deoxynucleotidyl transferase
  source 1..1182: mol_type = other DNA
atgcaccatcatcaccatcacgggggctccggccatccggaaggtaataccccggagaaggaggtgccgagcgttatcgcccgtcatgttagtccgtacgcgtgccagcgcaagaccacgctgaataactacaacaaaaagatcaccgacgcgctggagatcatggccgagaactacaagtttaaagagaacatgcaggcgcgcctggaggcccgtcgcgccgcgagtgtcctgaaaagcctgccgttcgaggttaccagcatgaaagacatccaaggtctgccgtgcattaccgacgacgtacgtcctgtgatcgaagagatcatcgaagtaggcgagagcagccgtgttaaagaaatcctcaatgacgagcgctacaaggcgtttaagcagttcaccagcgtgttcggtgtgggcgtcaagaccgcggaaaagtggtaccgtatgggcctccgtacgctggaggaagtaaaggccagtaagttcctgaagctgaacaagatgcagaaggcgggcttcctgtactacgaggatctggcgagcggtgttacgaaagaagaaaaagatgccgttctggatatcgtgaaggaaacggtgtggactgttgatccggatgcgctggtgaccatcgtgggcggtttccgccgtcgcaaaacgcagggccacgacgttgacctgctgatcacgattccgggccgtcctacggatccggagctgctccacaacgtggttgatctgctcaagaagcaaggtctgctgctgtacggggacatccgtgagcgtacgttcgtggaggggcaactgccaaatcctgcgccggaccagctggacggccatcagaagtgcttcgccattctcaagctgtaccgcccgaaggtggataacagtgcggttgggacgtcgaagaaagtcgacatggctgaggttaaggattggaaagcggttcgtgtggatctggtggtcgctccagatgagcagttcgcctatgcgaaactcggttggacgggcagcggcatgtttcgtcgcgatactcgtcgctacgcggaggaagagcgcgacatgctgctcgacaaccatggtctctacgacctgaaaaagggcatttttctgccggcggatagcgaagaagagattttcggtcatctggacctggattatctggagccgtggtatcgcaacgcg

SEQ ID NO: 6752 - protein, 394 aa, synthetic construct
  REGION 1..394: note = Variant of terminal deoxynucleotidyl transferase
MHHHHHHGGSGHPEGNTPEKEVPSVIARHVSPYACQRKTTLNNYNKKITDALEIMAENYKFKENMQARLEARRAASVLKSLPFEVTSMKDIQGLPCITDDVRPVIEEIIEVGESSRVKEILNDERYKAFKQFTSVFGVGVKTAEKWYRMGLRTLEEVKASKFLKLNKMQKAGFLYYEDLASGVTKEEKDAVLDIVKETVWTVDPDALVTIVGGFRRRKTQGHDVDLLITIPGRPTDPELLHNVVDLLKKQGLLLYGDIRERTFVEGQLPNPAPDQLDGHQKCFAILKLYRPKVDNSAVGTSKKVDMAEVKDWKAVRVDLVVAPDEQFAYAKLGWTGSGMFRRDTRRYAEEERDMLLDNHGLYDLKKGIFLPADSEEEIFGHLDLDYLEPWYRNA

SEQ ID NO: 6753 - DNA, 1182 bp, synthetic construct
  misc_feature 1..1182: note = Variant of terminal deoxynucleotidyl transferase
  source 1..1182: mol_type = other DNA
atgcaccatcatcaccatcacgggggctccggccatccggaaggtaataccccggagaaggaggtgccgagcgttatcgcccgtcatgttagtccgtacgcgtgccagcgcaagaccacgctgaataactacaacaaaaagatcaccgacgcgctggagatcatggccgagaactacaagtttaaagagaacctgcaggcgcgcctggaggcccgtcgcgccgcgagtgtcctgaaaagcctgccgttcgaggttaccagcatgaaagacatccaaggtctgccgtgcattaccgacgacgtacgtcctgtgatcgaagagatcatcgaagtaggcgagagcagccgtgttaaagaaatcctcaatgacgagcgctacaagaaatttaagcagttcaccagcgtgttcggtgtgggcgtcaagaccgcggaaaagtggtaccgtatgggcctccgtacgctggaagaagtaaaggcaagtaagttcctgaagctgaacaagatgcagaaggcgggcttcctgtactacgaggatctggcgagcggtgttacgaaagaagaaaaagatgccgttctggatatcgtgaaggaaacggtgtggactgttgatccggatgcgctggtgaccatcgtgggcggtttccgccgtcgcaaaccacagggccacgacgttgacctgctgctgacgattccgggccgtcctacggatccggagctgctccacaacgtggttgatctgctcaagaagcaaggtctgctgctgtacggggacatccgtgagcgtacgttcgtggaggggcaactgccaaatcctgcgccggaccagctggacggccatcagaagtgcttcgccattctcaagctgtaccgcccgaaggtggataacagtgcggttgggacgtcgaagaaagtcgacatggctgaggttaaggattggaaagcggttcgtgtggatctggtggtcgctccagatgagcagttcgcctatgcgaaactcggttggacgggcagcggcatgtttcgtcgcgatactcgtcgctacgcggaggaagagcgcgacatgctgctcgacaaccatggtctctacgacctgaaaaagggcatttttctgagtgcgacgagcgaagaagagattttcggtcatctggacctggattatctggagccgtggtatcgcaacgcg

SEQ ID NO: 6754 - protein, 394 aa, synthetic construct
  REGION 1..394: note = Variant of terminal deoxynucleotidyl transferase
MHHHHHHGGSGHPEGNTPEKEVPSVIARHVSPYACQRKTTLNNYNKKITDALEIMAENYKFKENLQARLEARRAASVLKSLPFEVTSMKDIQGLPCITDDVRPVIEEIIEVGESSRVKEILNDERYKKFKQFTSVFGVGVKTAEKWYRMGLRTLEEVKASKFLKLNKMQKAGFLYYEDLASGVTKEEKDAVLDIVKETVWTVDPDALVTIVGGFRRRKPQGHDVDLLLTIPGRPTDPELLHNVVDLLKKQGLLLYGDIRERTFVEGQLPNPAPDQLDGHQKCFAILKLYRPKVDNSAVGTSKKVDMAEVKDWKAVRVDLVVAPDEQFAYAKLGWTGSGMFRRDTRRYAEEERDMLLDNHGLYDLKKGIFLSATSEEEIFGHLDLDYLEPWYRNA

SEQ ID NO: 6755 - DNA, 1182 bp, synthetic construct
  misc_feature 1..1182: note = Variant of terminal deoxynucleotidyl transferase
  source 1..1182: mol_type = other DNA
atgcaccatcatcaccatcacgggggctccggccatccggaaggtaataccccggagaaggaggtgccgagcgttatcgcccgtcatgttagtccgtacgcgtgccagcgcaagaccacgctgaataactacaacaaaaagatcaccgacgcgctggagatcatggccgagaactacaagtttaaagagaacctgcaggcgcgcctggaggcccgtcgcgccgcgagtgtcctgaaaagcctgccgttcgaggttaccagcatgaaagacatccaaggtctgccgtgcattaccgacgacgtacgtcctgtgatcgaagagatcatcgaagtaggcgagagcagccgtgttaaagaaatcctcaatgacgagcgctacaaggcgtttaagcagttcaccagcgtgttcggtgtgggcgtcaagaccgcggaaaagtggtaccgtatgggcctgcgtacgctggaggaagtaaaggcaagtaagttcctgaagctgaacaagatgcagaaggcgggcttcctgtactacgaggatctggcgagcggtgttacgaaagaagaaaaagatgccgttctggatatcgtgaaggaaacggtgtggactgttgatccggatgcgctggtgaccatcgtgggcggtttccgccgtcgcaaaacgcagggccacgacgttgacctgctgattacgattccgggccgtcctacggatccggagctgctccacaacgtggttgatctgctcaagaagcaaggtctgctgctgtacggggacatccgtgagcgtacgttcgtggaggggcaactgccaaatcctgcgccggaccagctggacggccatcagaagtgcttcgccattctcaagctgtaccgcccgaaggtggataacagtgcggttgggacgtcgaagaaagtcgacatggctgaggttaaggattggaaagcggttcgtgtggatctggtggtcgctccagatgagcagttcgcctatgcgaaactcggttggacgggcagcggcatgtttcgtcgcgatactcgtcgctacgcggaggaagagcgcgatatgctgctcgacaaccatggtctctacgacctgaaaaagggcatttttctgagtgcggatagcgaagaagagattttcggtcatctggacctggattatctggagccgtggtatcgcaacgcg

SEQ ID NO: 6756 - protein, 394 aa, synthetic construct
  REGION 1..394: note = Variant of terminal deoxynucleotidyl transferase
MHHHHHHGGSGHPEGNTPEKEVPSVIARHVSPYACQRKTTLNNYNKKITDALEIMAENYKFKENLQARLEARRAASVLKSLPFEVTSMKDIQGLPCITDDVRPVIEEIIEVGESSRVKEILNDERYKAFKQFTSVFGVGVKTAEKWYRMGLRTLEEVKASKFLKLNKMQKAGFLYYEDLASGVTKEEKDAVLDIVKETVWTVDPDALVTIVGGFRRRKTQGHDVDLLITIPGRPTDPELLHNVVDLLKKQGLLLYGDIRERTFVEGQLPNPAPDQLDGHQKCFAILKLYRPKVDNSAVGTSKKVDMAEVKDWKAVRVDLVVAPDEQFAYAKLGWTGSGMFRRDTRRYAEEERDMLLDNHGLYDLKKGIFLSADSEEEIFGHLDLDYLEPWYRNA

SEQ ID NO: 6757 - DNA, 1182 bp, synthetic construct
  misc_feature 1..1182: note = Variant of terminal deoxynucleotidyl transferase
  source 1..1182: mol_type = other DNA
atgcaccatcatcaccatcacgggggctccggccatccggaaggtaataccccggagaaggaggtgccgagcgttatcgcccgtcatgttagtccgtacgcgtgccagcgcaagaccacgctgaataactacaacaaaaagatcaccgacgcgctggagatcatggccgagaactacaagtttaaagagaacctgcaggcgcgcctggaggcccgtcgcgccgcgagtgtcctgaaaagcctgccgttcgaggttaccagcatgaaagacatccaaggtctgccgtgcattaccgacgacgtacgtcctgtgatcgaagagatcatcgaagtaggcgagagcagccgtgttaaagaaatcctcaatgacgagcgctacaaggcgtttaagcagttcaccagcgtgttcggtgtgggcgtcaagaccgcggaaaagtggtaccgtatgggcctgcgtacgctgaaggaagtaaaggccagtaagttcctgaagctgaacaagatgcagaaggcgggcttcctgtactacgaggatctggcgagcggtgttacgaaagaagaaaaagatgccgttctggatatcgtgaaggaaacggtgtggactgttgatccggatgcgctggtgaccatcgtgggcggtttccgccgtcgcaaaacgcagggccacgacgttgacctgctgatcacgattccgggccgtcctacggatccggagctgctccacaacgtggttgatctgctcaagaagcaaggtctgctgctgtacggggacatccgtgagcgtacgttcgtggaggggcaactgccaaatcctgcgccggaccagctggacggccatcagaagtgcttcgccattctcaagctgtaccgcccgaaggtggataacagtgcggttgggacgtcgaagaaagtcgacatggctgaggttaaggattggaaagcggttcgtgtggatctggtggtcgctccagatgagcagttcgcctatgcgaaactcggttggacgggcagcggcatgtttcgtcgcgatactcgtcgctacgcggaggaagagcgcgatatgctgctcgacaaccatggtctctacgacctgaaaaagggcatttttctgagtgcggacagcgaagaagagattttcggtcatctggacctggattatctggagccgtggtatcgcaacgcg

SEQ ID NO: 6758 - protein, 394 aa, synthetic construct
  REGION 1..394: note = Variant of terminal deoxynucleotidyl transferase
MHHHHHHGGSGHPEGNTPEKEVPSVIARHVSPYACQRKTTLNNYNKKITDALEIMAENYKFKENLQARLEARRAASVLKSLPFEVTSMKDIQGLPCITDDVRPVIEEIIEVGESSRVKEILNDERYKAFKQFTSVFGVGVKTAEKWYRMGLRTLKEVKASKFLKLNKMQKAGFLYYEDLASGVTKEEKDAVLDIVKETVWTVDPDALVTIVGGFRRRKTQGHDVDLLITIPGRPTDPELLHNVVDLLKKQGLLLYGDIRERTFVEGQLPNPAPDQLDGHQKCFAILKLYRPKVDNSAVGTSKKVDMAEVKDWKAVRVDLVVAPDEQFAYAKLGWTGSGMFRRDTRRYAEEERDMLLDNHGLYDLKKGIFLSADSEEEIFGHLDLDYLEPWYRNA

SEQ ID NO: 6759 - DNA, 1182 bp, synthetic construct
  misc_feature 1..1182: note = Variant of terminal deoxynucleotidyl transferase
  source 1..1182: mol_type = other DNA
atgcaccatcatcaccatcacgggggctccggccatccggaaggtaataccccggagaaggaggtgccgagcgttatcgcccgtcatgttagtccgtacgcgtgccagcgcaagaccacgctgaataactacaacaaaaagatcaccgacgcgctggagatcatggccgagaactacaagtttaaagagaacctgcaggcgcgcctggaggcccgtcgcgccgcgagtgtcctgaaaagcctgccgttcgaggttaccagcatgaaagacatccaaggtctgccgtgcattaccgacgacgtacgtcctgtgatcgaagagatcatcgaagtaggcgagagcagccgtgttaaagaaatcctcaatgacgagcgctacaagaaatttaagcagttcaccagcgtgttcggtgtgggcgtcaagaccgcggaaaagtggtaccgtatgggcctccgtacgctggaagaagtaaaggcaagtaagttcctgaagctgaacaagatgcagaaggcgggcttcctgtactacgaggatctggcgagcggtgttacgaaagaagaaaaagatgccgttctggatatcgtgaaggaaacggtgtggactgttgatccggatgcgctggtgaccatcgtgggcggtttccgccgtcgcaaaccacagggccacgacgttgacctgctgatcacgattccgggccgtcctacggatccggagctgctccacaacgtggttgatctgctcaagaagcaaggtctgctgctgtacggggacatccgtgagcgtacgttcgtggaggggcaactgccaaatcctgcgccggaccagctggacggccatcagaagtgcttcgccattctcaagctgtaccgcccgaaggtggataacagtgcggttgggacgtcgaagaaagtcgacatggctgaggttaaggattggaaagcggttcgtgtggatctggtggtcgctccagatgagcagttcgcctatgcgaaactcggttggacgggcagcggcatgtttcgtcgcgatactcgtcgctacgcggaggaagagcgcgacatgctgctcgacaaccatggtctctacgacctgaaaaagggcatttttctgagtgcgacgagcgaagaagagattttcggtcatctggacctggattatctggagccgtggtatcgcaacgcg

SEQ ID NO: 6760 - protein, 394 aa, synthetic construct
  REGION 1..394: note = Variant of terminal deoxynucleotidyl transferase
MHHHHHHGGSGHPEGNTPEKEVPSVIARHVSPYACQRKTTLNNYNKKITDALEIMAENYKFKENLQARLEARRAASVLKSLPFEVTSMKDIQGLPCITDDVRPVIEEIIEVGESSRVKEILNDERYKKFKQFTSVFGVGVKTAEKWYRMGLRTLEEVKASKFLKLNKMQKAGFLYYEDLASGVTKEEKDAVLDIVKETVWTVDPDALVTIVGGFRRRKPQGHDVDLLITIPGRPTDPELLHNVVDLLKKQGLLLYGDIRERTFVEGQLPNPAPDQLDGHQKCFAILKLYRPKVDNSAVGTSKKVDMAEVKDWKAVRVDLVVAPDEQFAYAKLGWTGSGMFRRDTRRYAEEERDMLLDNHGLYDLKKGIFLSATSEEEIFGHLDLDYLEPWYRNA

SEQ ID NO: 6761 - DNA, 1182 bp, synthetic construct
  misc_feature 1..1182: note = Variant of terminal deoxynucleotidyl transferase
  source 1..1182: mol_type = other DNA
atgcaccatcatcaccatcacgggggctccggccatccggaaggtaataccccggagaaggaggtgccgagcgttatcgcccgtcatgttagtccgtacgcgtgccagcgcaagaccacgctgaataactacaacaaaaagatcaccgacgcgctggagatcatggccgagaactacaagtttaaagagaacctgcaggcgcgcctggaggcccgtcgcgccgcgagtgtcctgaaaagcctgccgttcgaggttaccagcatgaaagacatccaaggtctgccgtgcattaccgacgacgtacgtcctgtgatcgaagagatcatcgaagtaggcgagagcagccgtgttaaagaaatcctcaatgacgagcgctacaaggcgtttaagcagttcaccagcgtgttcggtgtgggcgtcaagaccgcggaaaagtggtaccgtatgggcaaacgtacgctgaaggaagtaaaggccagtaagttcctgaagctgaacaagatgcagaaggcgggcttcctgtactacgaggatctggcgagcggtgttacgaaagaagaaaaagatgccgttctggatatcgtgaaggaaacggtgtggactgttgatccggatgcgctggtgaccatcgtgggcggtttccgccgtcgcaaaccacagggccacgacgttgacctgctgatcacgattccgggccgtcctacggatccggagctgctccacaacgtggttgatctgctcaagaagcaaggtctgctgctgtacggggacatccgtgagcgtacgttcgtggaggggcaactgccaaatcctgcgccggaccagctggacggccatcagaagtgcttcgccattctcaagctgtaccgcccgaaggtggataacagtgcggttgggacgtcgaagaaagtcgacatggctgaggttaaggattggaaagcggttcgtgtggatctggtggtcgctccagatgagcagttcgcctatgcgaaactcggttggacgggcagcggcatgtttcgtcgcgatactcgtcgctacgcggaggaagagcgcgacatgctgctcgacaaccatggtctctacgacctgaaaaagggcatttttctgagtgcggatagcgaagaagagattttcggtcatctggacctggattatctggagccgtggtatcgcaacgcg

SEQ ID NO: 6762 - protein, 394 aa, synthetic construct
  REGION 1..394: note = Variant of terminal deoxynucleotidyl transferase
MHHHHHHGGSGHPEGNTPEKEVPSVIARHVSPYACQRKTTLNNYNKKITDALEIMAENYKFKENLQARLEARRAASVLKSLPFEVTSMKDIQGLPCITDDVRPVIEEIIEVGESSRVKEILNDERYKAFKQFTSVFGVGVKTAEKWYRMGKRTLKEVKASKFLKLNKMQKAGFLYYEDLASGVTKEEKDAVLDIVKETVWTVDPDALVTIVGGFRRRKPQGHDVDLLITIPGRPTDPELLHNVVDLLKKQGLLLYGDIRERTFVEGQLPNPAPDQLDGHQKCFAILKLYRPKVDNSAVGTSKKVDMAEVKDWKAVRVDLVVAPDEQFAYAKLGWTGSGMFRRDTRRYAEEERDMLLDNHGLYDLKKGIFLSADSEEEIFGHLDLDYLEPWYRNA

SEQ ID NO: 6763 - DNA, 1182 bp, synthetic construct
  misc_feature 1..1182: note = Variant of terminal deoxynucleotidyl transferase
  source 1..1182: mol_type = other DNA
atgcaccatcatcaccatcacgggggctccggccatccggaaggtaataccccggagaaggaggtgccgagcgttatcgcccgtcatgttagtccgtacgcgtgccagcgcaagaccacgctgaataactacaacaaaaagatcaccgacgcgctggagatcatggccgagaactacaagtttaaagagaacctgcaggcgcgcctggaggcccgtcgcgccgcgagtgtcctgaaaagcctgccgttcgaggttaccagcatgaaagacatccaaggtctgccgtgcattaccgacgacgtacgtcctgtgatcgaagagatcatcgaagtaggcgagagcagccgtgttaaagaaatcctcaatgacgagcgctacaagaaatttaagcagttcaccagcgtgttcggtgtgggcgtcaagaccgcggaaaagtggtaccgtatgggcctgcgtacgctggaggaagtaaaggccagtaagttcctgaagctgaacaagatgcagaaggcgggcttcctgtactacgaggatctggcgagcggtgttacgaaagaagaaaaagatgccgttctggatatcgtgaaggaaacggtgtggactgttgatccggatgcgctggtgaccatcgtgggcggtttccgccgtcgcaaaccgcagggccacgacgttgacctgctgctgacgattccgggccgtcctacggatccggagctgctccacaacgtggttgatctgctcaagaagcaaggtctgctgctgtacggggacatccgtgagcgtacgttcgtggaggggcaactgccaaatcctgcgccggaccagctggacggccatcagaagtgcttcgccattctcaagctgtaccgcccgaaggtggataacagtgcggttgggacgtcgaagaaagtcgacatggctgaggttaaggattggaaagcggttcgtgtggatctggtggtcgctccagatgagcagttcgcctatgcgaaactcggttggacgggcagcggcatgtttcgtcgcgatactcgtcgctacgcggaggaagagcgcgatatgctgctcgacaaccatggtctctacgacctgaaaaagggcatttttctgccggcggatagcgaagaagagattttcggtcatctggacctggattatctggagccgtggtatcgcaacgcg

SEQ ID NO: 6764 - protein, 394 aa, synthetic construct
  REGION 1..394: note = Variant of terminal deoxynucleotidyl transferase
MHHHHHHGGSGHPEGNTPEKEVPSVIARHVSPYACQRKTTLNNYNKKITDALEIMAENYKFKENLQARLEARRAASVLKSLPFEVTSMKDIQGLPCITDDVRPVIEEIIEVGESSRVKEILNDERYKKFKQFTSVFGVGVKTAEKWYRMGLRTLEEVKASKFLKLNKMQKAGFLYYEDLASGVTKEEKDAVLDIVKETVWTVDPDALVTIVGGFRRRKPQGHDVDLLLTIPGRPTDPELLHNVVDLLKKQGLLLYGDIRERTFVEGQLPNPAPDQLDGHQKCFAILKLYRPKVDNSAVGTSKKVDMAEVKDWKAVRVDLVVAPDEQFAYAKLGWTGSGMFRRDTRRYAEEERDMLLDNHGLYDLKKGIFLPADSEEEIFGHLDLDYLEPWYRNA

SEQ ID NO: 6765 - DNA, 1182 bp, synthetic construct
  misc_feature 1..1182: note = Variant of terminal deoxynucleotidyl transferase
  source 1..1182: mol_type = other DNA
atgcaccatcatcaccatcacgggggctccggccatccggaaggtaataccccggagaaggaggtgccgagcgttatcgcccgtcatgttagtccgtacgcgtgccagcgcaagaccacgctgaataactacaacaaaaagatcaccgacgcgctggagatcatggccgagaactacaagtttaaagagaacctgcaggcgcgcctggaggcccgtcgcgccgcgagtgtcctgaaaagcctgccgttcgaggttaccagcatgaaagacatccaaggtctgccgtgcattaccgacgacgtacgtcctgtgatcgaagagatcatcgaagtaggcgagagcagccgtgttaaagaaatcctcaatgacgagcgctacaaggcgtttaagcagttcaccagcgtgttcggtgtgggcgtcaagaccgcggaaaagtggtaccgtatgggcctgcgtacgctgaaggaagtaaaggccagtaagttcctgaagctgaacaagatgcagaaggcgggcttcctgtactacgaggatctggcgagcggtgttacgaaagaagaaaaagatgccgttctggatatcgtgaaggaaacggtgtggactgttgatccggatgcgctggtgaccatcgtgggcggtttccgccgtcgcaaaccacagggccacgacgttgacctgctgatcacgattccgggccgtcctacggatccggagctgctccacaacgtggttgatctgctcaagaagcaaggtctgctgctgtacggggacatccgtgagcgtacgttcgtggaggggcaactgccaaatcctgcgccggaccagctggacggccatcagaagtgcttcgccattctcaagctgtaccgcccgaaggtggataacagtgcggttgggacgtcgaagaaagtcgacatggctgaggttaaggattggaaagcggttcgtgtggatctggtggtcgctccagatgagcagttcgcctatgcgaaactcggttggacgggcagcggcatgtttcgtcgcgatactcgtcgctacgcggaggaagagcgcgatatgctgctcgacaaccatggtctctacgacctgaaaaagggcatttttctgagtgcggacagcgaagaagagattttcggtcatctggacctggattatctggagccgtggtatcgcaacgcg

SEQ ID NO: 6766 - protein, 394 aa, synthetic construct; identical to SEQ ID NO: 6636
  REGION 1..394: note = Variant of terminal deoxynucleotidyl transferase

SEQ ID NO: 6767 - DNA, 20 bp, synthetic construct
  misc_feature 1..20: note = oligo substrate or (by)product
  modified_base 1: mod_base = OTHER; note = 6-carboxyfluorescein-thymine
  source 1..20: mol_type = other DNA
tttttttttttttttttctg

SEQ ID NO: 6768 - DNA, 21 bp, synthetic construct
  misc_feature 1..21: note = oligo substrate or (by)product
  modified_base 1: mod_base = OTHER; note = 6-carboxyfluorescein-thymine
  modified_base 21: mod_base = OTHER; note = 3'-PO4-guanine
  source 1..21: mol_type = other DNA
tttttttttttttttttctgg

SEQ ID NO: 6769 - DNA, 21 bp, synthetic construct
  misc_feature 1..21: note = oligo substrate or (by)product
  modified_base 1: mod_base = OTHER; note = 6-carboxyfluorescein-thymine
  modified_base 21: mod_base = OTHER; note = 3'-PO4-thymine
  source 1..21: mol_type = other DNA
tttttttttttttttttctgt

SEQ ID NO: 6770 - DNA, 20 bp, synthetic construct
  misc_feature 1..20: note = oligo substrate or (by)product
  modified_base 1: mod_base = OTHER; note = 6-carboxyfluorescein-thymine
  source 1..20: mol_type = other DNA
tttttttttttttttttgaa

SEQ ID NO: 6771 - DNA, 21 bp, synthetic construct
  misc_feature 1..21: note = oligo substrate or (by)product
  modified_base 1: mod_base = OTHER; note = 6--carboxyfluorescein-thymine
  modified_base 21: mod_base = OTHER; note = 3'-PO4-guanine
  source 1..21: mol_type = other DNA
tttttttttttttttttgaag

SEQ ID NO: 6772 - DNA, 21 bp, synthetic construct
  misc_feature 1..21: note = oligo substrate or (by)product
  modified_base 1: mod_base = OTHER; note = 6-carboxyfluorescein-thymine
  modified_base 21: mod_base = OTHER; note = 3'-PO4-thymine
  source 1..21: mol_type = other DNA
tttttttttttttttttgaat

SEQ ID NO: 6773 - DNA, 20 bp, synthetic construct
  misc_feature 1..20: note = oligo substrate or (by)product
  modified_base 1: mod_base = OTHER; note = 6-carboxyfluorescein-thymine
  source 1..20: mol_type = other DNA
tttttttttttttttttgtt

SEQ ID NO: 6774 - DNA, 21 bp, synthetic construct
  misc_feature 1..21: note = oligo substrate or (by)product
  modified_base 1: mod_base = OTHER; note = 6-carboxyfluorescein-thymine
  modified_base 21: mod_base = OTHER; note = 3'-PO4-guanine
  source 1..21: mol_type = other DNA
tttttttttttttttttgttg

SEQ ID NO: 6775 - DNA, 21 bp, synthetic construct
  misc_feature 1..21: note = oligo substrate or (by)product
  modified_base 1: mod_base = OTHER; note = 6-carboxyfluorescein-thymine
  modified_base 21: mod_base = OTHER; note = 3'-PO4-thymine
  source 1..21: mol_type = other DNA
tttttttttttttttttgttt
